United States Patent Application Publication US 2026/0258423 A1 - sequence listing, part 8

SEQ ID NO: 167803 - DNA, 46709983 bp, Homo sapiens (residues 1,668,215-3,336,428 of 46,709,983)
  source 1..46709983: mol_type = genomic DNA
nnnnnnnnnnnnnnnnnnnnnnnnnnnnnnnnnnnnnnnnnnnnnnnnnnnnnnnnnnnnnnnnnnnnnnnnnnnnnnnnnnnnnnnnnnnnnnnnnnnnnnnnnnnnnnnnnnnnnnnnnnnnnnnnnnnnnnnnnnnnnnnnnnnnnnnnnnnnnnnnnnnnnnnnnnnnnnnnnnnnnnnnnnnnnnnnnnnnnnnnnnnnnnnnnnnnnnnnnnnnnnnnnnnnnnnnnnnnnnnnnnnnnnnnnnnnnnnnnnnnnnnnnnnnnnnnnnnnnnnnnnnnnnnnnnnnnnnnnnnnnnnnnnnnnnnnnnnnnnnnnnnnnnnnnnnnnnnnnnnnnnnnnnnnnnnnnnnnnnnnnnnnnnnnnnnnnnnnnnnnnnnnnnnnnnnnnnnnnnnnnnnnnnnnnnnnnnnnnnnnnnnnnnnnnnnnnnnnnnnnnnnnnnnnnnnnnnnnnnnnnnnnnnnnnnnnnnnnnnnnnnnnnnnnnnnnnnnnnnnnnnnnnnnnnnnnnnnnnnnnnnnnnnnnnnnnnnnnnnnnnnnnnnnnnnnnnnnnnnnnnnnnnnnnnnnnnnnnnnnnnnnnnnnnnnnnnnnnnnnnnnnnnnnnnnnnnnnnnnnnnnnnnnnnnnnnnnnnnnnnnnnnnnnnnnnnnnnnnnnnnnnnnnnnnnnnnnnnnnnnnnnnnnnnnnnnnnnnnnnnnnnnnnnnnnnnnnnnnnnnnnnnnnnnnnnnnnnnnnnnnnnnnnnnnnnnnnnnnnnnnnnnnnnnnnnnnnnnnnnnnnnnnnnnnnnnnnnnnnnnnnnnnnnnnnnnnnnnnnnnnnnnnnnnnnnnnnnnnnnnnnnnnnnnnnnnnnnnnnnnnnnnnnnnnnnnnnnnnnnnnnnnnnnnnnnnnnnnnnnnnnnnnnnnnnnnnnnnnnnnnnnnnnnnnnnnnnnnnnnnnnnnnnnnnnnnnnnnnnnnnnnnnnnnnnnnnnnnnnnnnnnnnnnnnnnnnnnnnnnnnnnnnnnnnnnnnnnnnnnnnnnnnnnnnnnnnnnnnnnnnnnnnnnnnnnnnnnnnnnnnnnnnnnnnnnnnnnnnnnnnnnnnnnnnnnnnnnnnnnnnnnnnnnnnnnnnnnnnnnnnnnnnnnnnnnnnnnnnnnnnnnnnnnnnnnnnnnnnnnnnnnnnnnnnnnnnnnnnnnnnnnnnnnnnnnnnnnnnnnnnnnnnnnnnnnnnnnnnnnnnnnnnnnnnnnnnnnnnnnnnnnnnnnnnnnnnnnnnnnnnnnnnnnnnnnnnnnnnnnnnnnnnnnnnnnnnnnnnnnnnnnnnnnnnnnnnnnnnnnnnnnnnnnnnnnnnnnnnnnnnnnnnnnnnnnnnnnnnnnnnnnnnnnnnnnnnnnnnnnnnnnnnnnnnnnnnnnnnnnnnnnnnnnnnnnnnnnnnnnnnnnnnnnnnnnnnnnnnnnnnnnnnnnnnnnnnnnnnnnnnnnnnnnnnnnnnnnnnnnnnnnnnnnnnnnnnnnnnnnnnnnnnnnnnnnnnnnnnnnnnnnnnnnnnnnnnnnnnnnnnnnnnnnnnnnnnnnnnnnnnnnnnnnnnnnnnnnnnnnnnnnnnnnnnnnnnnnnnnnnnnnnnnnnnnnnnnnnnnnnnnnnnnnnnnnnnnnnnnnnnnnnnnnnnnnnnnnnnnnnnnnnnnnnnnnnnnnnnnnnnnnnnnnnnnnnnnnnnnnnnnnnnnnnnnnnnnnnnnnnnnnnnnnnnnnnnnnnnnnnnnnnnnnnnnnnnnnnnnnnnnnnnnnnnnnnnnnnnnnnnnnnnnnnnnnnnnnnnnnnnnnnnnnnnnnnnnnnnnnnnnnnnnnnnnnnnnnnnnnnnnnnnnnnnnnnnnnnnnnnnnnnnnnnnnnnnnnnnnnnnnnnnnnnnnnnnnnnnnnnnnnnnnnnnnnnnnnnnnnnnnnnnnnnnnnnnnnnnnnnnnnnnnnnnnnnnnnnnnnnnnnnnnnnnnnnnnnnnnnnnnnnnnnnnnnnnnnnnnnnnnnnnnnnnnnnnnnnnnnnnnnnnnnnnnnnnnnnnnnnnnnnnnnnnnnnnnnnnnnnnnnnnnnnnnnnnnnnnnnnnnnnnnnnnnnnnnnnnnnnnnnnnnnnnnnnnnnnnnnnnnnnnnnnnnnnnnnnnnnnnnnnnnnnnnnnnnnnnnnnnnnnnnnnnnnnnnnnnnnnnnnnnnnnnnnnnnnnnnnnnnnnnnnnnnnnnnnnnnnnnnnnnnnnnnnnnnnnnnnnnnnnnnnnnnnnnnnnnnnnnnnnnnnnnnnnnnnnnnnnnnnnnnnnnnnnnnnnnnnnnnnnnnnnnnnnnnnnnnnnnnnnnnnnnnnnnnnnnnnnnnnnnnnnnnnnnnnnnnnnnnnnnnnnnnnnnnnnnnnnnnnnnnnnnnnnnnnnnnnnnnnnnnnnnnnnnnnnnnnnnnnnnnnnnnnnnnnnnnnnnnnnnnnnnnnnnnnnnnnnnnnnnnnnnnnnnnnnnnnnnnnnnnnnnnnnnnnnnnnnnnnnnnnnnnnnnnnnnnnnnnnnnnnnnnnnnnnnnnnnnnnnnnnnnnnnnnnnnnnnnnnnnnnnnnnnnnnnnnnnnnnnnnnnnnnnnnnnnnnnnnnnnnnnnnnnnnnnnnnnnnnnnnnnnnnnnnnnnnnnnnnnnnnnnnnnnnnnnnnnnnnnnnnnnnnnnnnnnnnnnnnnnnnnnnnnnnnnnnnnnnnnnnnnnnnnnnnnnnnnnnnnnnnnnnnnnnnnnnnnnnnnnnnnnnnnnnnnnnnnnnnnnnnnnnnnnnnnnnnnnnnnnnnnnnnnnnnnnnnnnnnnnnnnnnnnnnnnnnnnnnnnnnnnnnnnnnnnnnnnnnnnnnnnnnnnnnnnnnnnnnnnnnnnnnnnnnnnnnnnnnnnnnnnnnnnnnnnnnnnnnnnnnnnnnnnnnnnnnnnnnnnnnnnnnnnnnnnnnnnnnnnnnnnnnnnnnnnnnnnnnnnnnnnnnnnnnnnnnnnnnnnnnnnnnnnnnnnnnnnnnnnnnnnnnnnnnnnnnnnnnnnnnnnnnnnnnnnnnnnnnnnnnnnnnnnnnnnnnnnnnnnnnnnnnnnnnnnnnnnnnnnnnnnnnnnnnnnnnnnnnnnnnnnnnnnnnnnnnnnnnnnnnnnnnnnnnnnnnnnnnnnnnnnnnnnnnnnnnnnnnnnnnnnnnnnnnnnnnnnnnnnnnnnnnnnnnnnnnnnnnnnnnnnnnnnnnnnnnnnnnnnnnnnnnnnnnnnnnnnnnnnnnnnnnnnnnnnnnnnnnnnnnnnnnnnnnnnnnnnnnnnnnnnnnnnnnnnnnnnnnnnnnnnnnnnnnnnnnnnnnnnnnnnnnnnnnnnnnnnnnnnnnnnnnnnnnnnnnnnnnnnnnnnnnnnnnnnnnnnnnnnnnnnnnnnnnnnnnnnnnnnnnnnnnnnnnnnnnnnnnnnnnnnnnnnnnnnnnnnnnnnnnnnnnnnnnnnnnnnnnnnnnnnnnnnnnnnnnnnnnnnnnnnnnnnnnnnnnnnnnnnnnnnnnnnnnnnnnnnnnnnnnnnnnnnnnnnnnnnnnnnnnnnnnnnnnnnnnnnnnnnnnnnnnnnnnnnnnnnnnnnnnnnnnnnnnnnnnnnnnnnnnnnnnnnnnnnnnnnnnnnnnnnnnnnnnnnnnnnnnnnnnnnnnnnnnnnnnnnnnnnnnnnnnnnnnnnnnnnnnnnnnnnnnnnnnnnnnnnnnnnnnnnnnnnnnnnnnnnnnnnnnnnnnnnnnnnnnnnnnnnnnnnnnnnnnnnnnnnnnnnnnnnnnnnnnnnnnnnnnnnnnnnnnnnnnnnnnnnnnnnnnnnnnnnnnnnnnnnnnnnnnnnnnnnnnnnnnnnnnnnnnnnnnnnnnnnnnnnnnnnnnnnnnnnnnnnnnnnnnnnnnnnnnnnnnnnnnnnnnnnnnnnnnnnnnnnnnnnnnnnnnnnnnnnnnnnnnnnnnnnnnnnnnnnnnnnnnnnnnnnnnnnnnnnnnnnnnnnnnnnnnnnnnnnnnnnnnnnnnnnnnnnnnnnnnnnnnnnnnnnnnnnnnnnnnnnnnnnnnnnnnnnnnnnnnnnnnnnnnnnnnnnnnnnnnnnnnnnnnnnnnnnnnnnnnnnnnnnnnnnnnnnnnnnnnnnnnnnnnnnnnnnnnnnnnnnnnnnnnnnnnnnnnnnnnnnnnnnnnnnnnnnnnnnnnnnnnnnnnnnnnnnnnnnnnnnnnnnnnnnnnnnnnnnnnnnnnnnnnnnnnnnnnnnnnnnnnnnnnnnnnnnnnnnnnnnnnnnnnnnnnnnnnnnnnnnnnnnnnnnnnnnnnnnnnnnnnnnnnnnnnnnnnnnnnnnnnnnnnnnnnnnnnnnnnnnnnnnnnnnnnnnnnnnnnnnnnnnnnnnnnnnnnnnnnnnnnnnnnnnnnnnnnnnnnnnnnnnnnnnnnnnnnnnnnnnnnnnnnnnnnnnnnnnnnnnnnnnnnnnnnnnnnnnnnnnnnnnnnnnnnnnnnnnnnnnnnnnnnnnnnnnnnnnnnnnnnnnnnnnnnnnnnnnnnnnnnnnnnnnnnnnnnnnnnnnnnnnnnnnnnnnnnnnnnnnnnnnnnnnnnnnnnnnnnnnnnnnnnnnnnnnnnnnnnnnnnnnnnnnnnnnnnnnnnnnnnnnnnnnnnnnnnnnnnnnnnnnnnnnnnnnnnnnnnnnnnnnnnnnnnnnnnnnnnnnnnnnnnnnnnnnnnnnnnnnnnnnnnnnnnnnnnnnnnnnnnnnnnnnnnnnnnnnnnnnnnnnnnnnnnnnnnnnnnnnnnnnnnnnnnnnnnnnnnnnnnnnnnnnnnnnnnnnnnnnnnnnnnnnnnnnnnnnnnnnnnnnnnnnnnnnnnnnnnnnnnnnnnnnnnnnnnnnnnnnnnnnnnnnnnnnnnnnnnnnnnnnnnnnnnnnnnnnnnnnnnnnnnnnnnnnnnnnnnnnnnnnnnnnnnnnnnnnnnnnnnnnnnnnnnnnnnnnnnnnnnnnnnnnnnnnnnnnnnnnnnnnnnnnnnnnnnnnnnnnnnnnnnnnnnnnnnnnnnnnnnnnnnnnnnnnnnnnnnnnnnnnnnnnnnnnnnnnnnnnnnnnnnnnnnnnnnnnnnnnnnnnnnnnnnnnnnnnnnnnnnnnnnnnnnnnnnnnnnnnnnnnnnnnnnnnnnnnnnnnnnnnnnnnnnnnnnnnnnnnnnnnnnnnnnnnnnnnnnnnnnnnnnnnnnnnnnnnnnnnnnnnnnnnnnnnnnnnnnnnnnnnnnnnnnnnnnnnnnnnnnnnnnnnnnnnnnnnnnnnnnnnnnnnnnnnnnnnnnnnnnnnnnnnnnnnnnnnnnnnnnnnnnnnnnnnnnnnnnnnnnnnnnnnnnnnnnnnnnnnnnnnnnnnnnnnnnnnnnnnnnnnnnnnnnnnnnnnnnnnnnnnnnnnnnnnnnnnnnnnnnnnnnnnnnnnnnnnnnnnnnnnnnnnnnnnnnnnnnnnnnnnnnnnnnnnnnnnnnnnnnnnnnnnnnnnnnnnnnnnnnnnnnnnnnnnnnnnnnnnnnnnnnnnnnnnnnnnnnnnnnnnnnnnnnnnnnnnnnnnnnnnnnnnnnnnnnnnnnnnnnnnnnnnnnnnnnnnnnnnnnnnnnnnnnnnnnnnnnnnnnnnnnnnnnnnnnnnnnnnnnnnnnnnnnnnnnnnnnnnnnnnnnnnnnnnnnnnnnnnnnnnnnnnnnnnnnnnnnnnnnnnnnnnnnnnnnnnnnnnnnnnnnnnnnnnnnnnnnnnnnnnnnnnnnnnnnnnnnnnnnnnnnnnnnnnnnnnnnnnnnnnnnnnnnnnnnnnnnnnnnnnnnnnnnnnnnnnnnnnnnnnnnnnnnnnnnnnnnnnnnnnnnnnnnnnnnnnnnnnnnnnnnnnnnnnnnnnnnnnnnnnnnnnnnnnnnnnnnnnnnnnnnnnnnnnnnnnnnnnnnnnnnnnnnnnnnnnnnnnnnnnnnnnnnnnnnnnnnnnnnnnnnnnnnnnnnnnnnnnnnnnnnnnnnnnnnnnnnnnnnnnnnnnnnnnnnnnnnnnnnnnnnnnnnnnnnnnnnnnnnnnnnnnnnnnnnnnnnnnnnnnnnnnnnnnnnnnnnnnnnnnnnnnnnnnnnnnnnnnnnnnnnnnnnnnnnnnnnnnnnnnnnnnnnnnnnnnnnnnnnnnnnnnnnnnnnnnnnnnnnnnnnnnnnnnnnnnnnnnnnnnnnnnnnnnnnnnnnnnnnnnnnnnnnnnnnnnnnnnnnnnnnnnnnnnnnnnnnnnnnnnnnnnnnnnnnnnnnnnnnnnnnnnnnnnnnnnnnnnnnnnnnnnnnnnnnnnnnnnnnnnnnnnnnnnnnnnnnnnnnnnnnnnnnnnnnnnnnnnnnnnnnnnnnnnnnnnnnnnnnnnnnnnnnnnnnnnnnnnnnnnnnnnnnnnnnnnnnnnnnnnnnnnnnnnnnnnnnnnnnnnnnnnnnnnnnnnnnnnnnnnnnnnnnnnnnnnnnnnnnnnnnnnnnnnnnnnnnnnnnnnnnnnnnnnnnnnnnnnnnnnnnnnnnnnnnnnnnnnnnnnnnnnnnnnnnnnnnnnnnnnnnnnnnnnnnnnnnnnnnnnnnnnnnnnnnnnnnnnnnnnnnnnnnnnnnnnnnnnnnnnnnnnnnnnnnnnnnnnnnnnnnnnnnnnnnnnnnnnnnnnnnnnnnnnnnnnnnnnnnnnnnnnnnnnnnnnnnnnnnnnnnnnnnnnnnnnnnnnnnnnnnnnnnnnnnnnnnnnnnnnnnnnnnnnnnnnnnnnnnnnnnnnnnnnnnnnnnnnnnnnnnnnnnnnnnnnnnnnnnnnnnnnnnnnnnnnnnnnnnnnnnnnnnnnnnnnnnnnnnnnnnnnnnnnnnnnnnnnnnnnnnnnnnnnnnnnnnnnnnnnnnnnnnnnnnnnnnnnnnnnnnnnnnnnnnnnnnnnnnnnnnnnnnnnnnnnnnnnnnnnnnnnnnnnnnnnnnnnnnnnnnnnnnnnnnnnnnnnnnnnnnnnnnnnnnnnnnnnnnnnnnnnnnnnnnnnnnnnnnnnnnnnnnnnnnnnnnnnnnnnnnnnnnnnnnnnnnnnnnnnnnnnnnnnnnnnnnnnnnnnnnnnnnnnnnnnnnnnnnnnnnnnnnnnnnnnnnnnnnnnnnnnnnnnnnnnnnnnnnnnnnnnnnnnnnnnnnnnnnnnnnnnnnnnnnnnnnnnnnnnnnnnnnnnnnnnnnnnnnnnnnnnnnnnnnnnnnnnnnnnnnnnnnnnnnnnnnnnnnnnnnnnnnnnnnnnnnnnnnnnnnnnnnnnnnnnnnnnnnnnnnnnnnnnnnnnnnnnnnnnnnnnnnnnnnnnnnnnnnnnnnnnnnnnnnnnnnnnnnnnnnnnnnnnnnnnnnnnnnnnnnnnnnnnnnnnnnnnnnnnnnnnnnnnnnnnnnnnnnnnnnnnnnnnnnnnnnnnnnnnnnnnnnnnnnnnnnnnnnnnnnnnnnnnnnnnnnnnnnnnnnnnnnnnnnnnnnnnnnnnnnnnnnnnnnnnnnnnnnnnnnnnnnnnnnnnnnnnnnnnnnnnnnnnnnnnnnnnnnnnnnnnnnnnnnnnnnnnnnnnnnnnnnnnnnnnnnnnnnnnnnnnnnnnnnnnnnnnnnnnnnnnnnnnnnnnnnnnnnnnnnnnnnnnnnnnnnnnnnnnnnnnnnnnnnnnnnnnnnnnnnnnnnnnnnnnnnnnnnnnnnnnnnnnnnnnnnnnnnnnnnnnnnnnnnnnnnnnnnnnnnnnnnnnnnnnnnnnnnnnnnnnnnnnnnnnnnnnnnnnnnnnnnnnnnnnnnnnnnnnnnnnnnnnnnnnnnnnnnnnnnnnnnnnnnnnnnnnnnnnnnnnnnnnnnnnnnnnnnnnnnnnnnnnnnnnnnnnnnnnnnnnnnnnnnnnnnnnnnnnnnnnnnnnnnnnnnnnnnnnnnnnnnnnnnnnnnnnnnnnnnnnnnnnnnnnnnnnnnnnnnnnnnnnnnnnnnnnnnnnnnnnnnnnnnnnnnnnnnnnnnnnnnnnnnnnnnnnnnnnnnnnnnnnnnnnnnnnnnnnnnnnnnnnnnnnnnnnnnnnnnnnnnnnnnnnnnnnnnnnnnnnnnnnnnnnnnnnnnnnnnnnnnnnnnnnnnnnnnnnnnnnnnnnnnnnnnnnnnnnnnnnnnnnnnnnnnnnnnnnnnnnnnnnnnnnnnnnnnnnnnnnnnnnnnnnnnnnnnnnnnnnnnnnnnnnnnnnnnnnnnnnnnnnnnnnnnnnnnnnnnnnnnnnnnnnnnnnnnnnnnnnnnnnnnnnnnnnnnnnnnnnnnnnnnnnnnnnnnnnnnnnnnnnnnnnnnnnnnnnnnnnnnnnnnnnnnnnnnnnnnnnnnnnnnnnnnnnnnnnnnnnnnnnnnnnnnnnnnnnnnnnnnnnnnnnnnnnnnnnnnnnnnnnnnnnnnnnnnnnnnnnnnnnnnnnnnnnnnnnnnnnnnnnnnnnnnnnnnnnnnnnnnnnnnnnnnnnnnnnnnnnnnnnnnnnnnnnnnnnnnnnnnnnnnnnnnnnnnnnnnnnnnnnnnnnnnnnnnnnnnnnnnnnnnnnnnnnnnnnnnnnnnnnnnnnnnnnnnnnnnnnnnnnnnnnnnnnnnnnnnnnnnnnnnnnnnnnnnnnnnnnnnnnnnnnnnnnnnnnnnnnnnnnnnnnnnnnnnnnnnnnnnnnnnnnnnnnnnnnnnnnnnnnnnnnnnnnnnnnnnnnnnnnnnnnnnnnnnnnnnnnnnnnnnnnnnnnnnnnnnnnnnnnnnnnnnnnnnnnnnnnnnnnnnnnnnnnnnnnnnnnnnnnnnnnnnnnnnnnnnnnnnnnnnnnnnnnnnnnnnnnnnnnnnnnnnnnnnnnnnnnnnnnnnnnnnnnnnnnnnnnnnnnnnnnnnnnnnnnnnnnnnnnnnnnnnnnnnnnnnnnnnnnnnnnnnnnnnnnnnnnnnnnnnnnnnnnnnnnnnnnnnnnnnnnnnnnnnnnnnnnnnnnnnnnnnnnnnnnnnnnnnnnnnnnnnnnnnnnnnnnnnnnnnnnnnnnnnnnnnnnnnnnnnnnnnnnnnnnnnnnnnnnnnnnnnnnnnnnnnnnnnnnnnnnnnnnnnnnnnnnnnnnnnnnnnnnnnnnnnnnnnnnnnnnnnnnnnnnnnnnnnnnnnnnnnnnnnnnnnnnnnnnnnnnnnnnnnnnnnnnnnnnnnnnnnnnnnnnnnnnnnnnnnnnnnnnnnnnnnnnnnnnnnnnnnnnnnnnnnnnnnnnnnnnnnnnnnnnnnnnnnnnnnnnnnnnnnnnnnnnnnnnnnnnnnnnnnnnnnnnnnnnnnnnnnnnnnnnnnnnnnnnnnnnnnnnnnnnnnnnnnnnnnnnnnnnnnnnnnnnnnnnnnnnnnnnnnnnnnnnnnnnnnnnnnnnnnnnnnnnnnnnnnnnnnnnnnnnnnnnnnnnnnnnnnnnnnnnnnnnnnnnnnnnnnnnnnnnnnnnnnnnnnnnnnnnnnnnnnnnnnnnnnnnnnnnnnnnnnnnnnnnnnnnnnnnnnnnnnnnnnnnnnnnnnnnnnnnnnnnnnnnnnnnnnnnnnnnnnnnnnnnnnnnnnnnnnnnnnnnnnnnnnnnnnnnnnnnnnnnnnnnnnnnnnnnnnnnnnnnnnnnnnnnnnnnnnnnnnnnnnnnnnnnnnnnnnnnnnnnnnnnnnnnnnnnnnnnnnnnnnnnnnnnnnnnnnnnnnnnnnnnnnnnnnnnnnnnnnnnnnnnnnnnnnnnnnnnnnnnnnnnnnnnnnnnnnnnnnnnnnnnnnnnnnnnnnnnnnnnnnnnnnnnnnnnnnnnnnnnnnnnnnnnnnnnnnnnnnnnnnnnnnnnnnnnnnnnnnnnnnnnnnnnnnnnnnnnnnnnnnnnnnnnnnnnnnnnnnnnnnnnnnnnnnnnnnnnnnnnnnnnnnnnnnnnnnnnnnnnnnnnnnnnnnnnnnnnnnnnnnnnnnnnnnnnnnnnnnnnnnnnnnnnnnnnnnnnnnnnnnnnnnnnnnnnnnnnnnnnnnnnnnnnnnnnnnnnnnnnnnnnnnnnnnnnnnnnnnnnnnnnnnnnnnnnnnnnnnnnnnnnnnnnnnnnnnnnnnnnnnnnnnnnnnnnnnnnnnnnnnnnnnnnnnnnnnnnnnnnnnnnnnnnnnnnnnnnnnnnnnnnnnnnnnnnnnnnnnnnnnnnnnnnnnnnnnnnnnnnnnnnnnnnnnnnnnnnnnnnnnnnnnnnnnnnnnnnnnnnnnnnnnnnnnnnnnnnnnnnnnnnnnnnnnnnnnnnnnnnnnnnnnnnnnnnnnnnnnnnnnnnnnnnnnnnnnnnnnnnnnnnnnnnnnnnnnnnnnnnnnnnnnnnnnnnnnnnnnnnnnnnnnnnnnnnnnnnnnnnnnnnnnnnnnnnnnnnnnnnnnnnnnnnnnnnnnnnnnnnnnnnnnnnnnnnnnnnnnnnnnnnnnnnnnnnnnnnnnnnnnnnnnnnnnnnnnnnnnnnnnnnnnnnnnnnnnnnnnnnnnnnnnnnnnnnnnnnnnnnnnnnnnnnnnnnnnnnnnnnnnnnnnnnnnnnnnnnnnnnnnnnnnnnnnnnnnnnnnnnnnnnnnnnnnnnnnnnnnnnnnnnnnnnnnnnnnnnnnnnnnnnnnnnnnnnnnnnnnnnnnnnnnnnnnnnnnnnnnnnnnnnnnnnnnnnnnnnnnnnnnnnnnnnnnnnnnnnnnnnnnnnnnnnnnnnnnnnnnnnnnnnnnnnnnnnnnnnnnnnnnnnnnnnnnnnnnnnnnnnnnnnnnnnnnnnnnnnnnnnnnnnnnnnnnnnnnnnnnnnnnnnnnnnnnnnnnnnnnnnnnnnnnnnnnnnnnnnnnnnnnnnnnnnnnnnnnnnnnnnnnnnnnnnnnnnnnnnnnnnnnnnnnnnnnnnnnnnnnnnnnnnnnnnnnnnnnnnnnnnnnnnnnnnnnnnnnnnnnnnnnnnnnnnnnnnnnnnnnnnnnnnnnnnnnnnnnnnnnnnnnnnnnnnnnnnnnnnnnnnnnnnnnnnnnnnnnnnnnnnnnnnnnnnnnnnnnnnnnnnnnnnnnnnnnnnnnnnnnnnnnnnnnnnnnnnnnnnnnnnnnnnnnnnnnnnnnnnnnnnnnnnnnnnnnnnnnnnnnnnnnnnnnnnnnnnnnnnnnnnnnnnnnnnnnnnnnnnnnnnnnnnnnnnnnnnnnnnnnnnnnnnnnnnnnnnnnnnnnnnnnnnnnnnnnnnnnnnnnnnnnnnnnnnnnnnnnnnnnnnnnnnnnnnnnnnnnnnnnnnnnnnnnnnnnnnnnnnnnnnnnnnnnnnnnnnnnnnnnnnnnnnnnnnnnnnnnnnnnnnnnnnnnnnnnnnnnnnnnnnnnnnnnnnnnnnnnnnnnnnnnnnnnnnnnnnnnnnnnnnnnnnnnnnnnnnnnnnnnnnnnnnnnnnnnnnnnnnnnnnnnnnnnnnnnnnnnnnnnnnnnnnnnnnnnnnnnnnnnnnnnnnnnnnnnnnnnnnnnnnnnnnnnnnnnnnnnnnnnnnnnnnnnnnnnnnnnnnnnnnnnnnnnnnnnnnnnnnnnnnnnnnnnnnnnnnnnnnnnnnnnnnnnnnnnnnnnnnnnnnnnnnnnnnnnnnnnnnnnnnnnnnnnnnnnnnnnnnnnnnnnnnnnnnnnnnnnnnnnnnnnnnnnnnnnnnnnnnnnnnnnnnnnnnnnnnnnnnnnnnnnnnnnnnnnnnnnnnnnnnnnnnnnnnnnnnnnnnnnnnnnnnnnnnnnnnnnnnnnnnnnnnnnnnnnnnnnnnnnnnnnnnnnnnnnnnnnnnnnnnnnnnnnnnnnnnnnnnnnnnnnnnnnnnnnnnnnnnnnnnnnnnnnnnnnnnnnnnnnnnnnnnnnnnnnnnnnnnnnnnnnnnnnnnnnnnnnnnnnnnnnnnnnnnnnnnnnnnnnnnnnnnnnnnnnnnnnnnnnnnnnnnnnnnnnnnnnnnnnnnnnnnnnnnnnnnnnnnnnnnnnnnnnnnnnnnnnnnnnnnnnnnnnnnnnnnnnnnnnnnnnnnnnnnnnnnnnnnnnnnnnnnnnnnnnnnnnnnnnnnnnnnnnnnnnnnnnnnnnnnnnnnnnnnnnnnnnnnnnnnnnnnnnnnnnnnnnnnnnnnnnnnnnnnnnnnnnnnnnnnnnnnnnnnnnnnnnnnnnnnnnnnnnnnnnnnnnnnnnnnnnnnnnnnnnnnnnnnnnnnnnnnnnnnnnnnnnnnnnnnnnnnnnnnnnnnnnnnnnnnnnnnnnnnnnnnnnnnnnnnnnnnnnnnnnnnnnnnnnnnnnnnnnnnnnnnnnnnnnnnnnnnnnnnnnnnnnnnnnnnnnnnnnnnnnnnnnnnnnnnnnnnnnnnnnnnnnnnnnnnnnnnnnnnnnnnnnnnnnnnnnnnnnnnnnnnnnnnnnnnnnnnnnnnnnnnnnnnnnnnnnnnnnnnnnnnnnnnnnnnnnnnnnnnnnnnnnnnnnnnnnnnnnnnnnnnnnnnnnnnnnnnnnnnnnnnnnnnnnnnnnnnnnnnnnnnnnnnnnnnnnnnnnnnnnnnnnnnnnnnnnnnnnnnnnnnnnnnnnnnnnnnnnnnnnnnnnnnnnnnnnnnnnnnnnnnnnnnnnnnnnnnnnnnnnnnnnnnnnnnnnnnnnnnnnnnnnnnnnnnnnnnnnnnnnnnnnnnnnnnnnnnnnnnnnnnnnnnnnnnnnnnnnnnnnnnnnnnnnnnnnnnnnnnnnnnnnnnnnnnnnnnnnnnnnnnnnnnnnnnnnnnnnnnnnnnnnnnnnnnnnnnnnnnnnnnnnnnnnnnnnnnnnnnnnnnnnnnnnnnnnnnnnnnnnnnnnnnnnnnnnnnnnnnnnnnnnnnnnnnnnnnnnnnnnnnnnnnnnnnnnnnnnnnnnnnnnnnnnnnnnnnnnnnnnnnnnnnnnnnnnnnnnnnnnnnnnnnnnnnnnnnnnnnnnnnnnnnnnnnnnnnnnnnnnnnnnnnnnnnnnnnnnnnnnnnnnnnnnnnnnnnnnnnnnnnnnnnnnnnnnnnnnnnnnnnnnnnnnnnnnnnnnnnnnnnnnnnnnnnnnnnnnnnnnnnnnnnnnnnnnnnnnnnnnnnnnnnnnnnnnnnnnnnnnnnnnnnnnnnnnnnnnnnnnnnnnnnnnnnnnnnnnnnnnnnnnnnnnnnnnnnnnnnnnnnnnnnnnnnnnnnnnnnnnnnnnnnnnnnnnnnnnnnnnnnnnnnnnnnnnnnnnnnnnnnnnnnnnnnnnnnnnnnnnnnnnnnnnnnnnnnnnnnnnnnnnnnnnnnnnnnnnnnnnnnnnnnnnnnnnnnnnnnnnnnnnnnnnnnnnnnnnnnnnnnnnnnnnnnnnnnnnnnnnnnnnnnnnnnnnnnnnnnnnnnnnnnnnnnnnnnnnnnnnnnnnnnnnnnnnnnnnnnnnnnnnnnnnnnnnnnnnnnnnnnnnnnnnnnnnnnnnnnnnnnnnnnnnnnnnnnnnnnnnnnnnnnnnnnnnnnnnnnnnnnnnnnnnnnnnnnnnnnnnnnnnnnnnnnnnnnnnnnnnnnnnnnnnnnnnnnnnnnnnnnnnnnnnnnnnnnnnnnnnnnnnnnnnnnnnnnnnnnnnnnnnnnnnnnnnnnnnnnnnnnnnnnnnnnnnnnnnnnnnnnnnnnnnnnnnnnnnnnnnnnnnnnnnnnnnnnnnnnnnnnnnnnnnnnnnnnnnnnnnnnnnnnnnnnnnnnnnnnnnnnnnnnnnnnnnnnnnnnnnnnnnnnnnnnnnnnnnnnnnnnnnnnnnnnnnnnnnnnnnnnnnnnnnnnnnnnnnnnnnnnnnnnnnnnnnnnnnnnnnnnnnnnnnnnnnnnnnnnnnnnnnnnnnnnnnnnnnnnnnnnnnnnnnnnnnnnnnnnnnnnnnnnnnnnnnnnnnnnnnnnnnnnnnnnnnnnnnnnnnnnnnnnnnnnnnnnnnnnnnnnnnnnnnnnnnnnnnnnnnnnnnnnnnnnnnnnnnnnnnnnnnnnnnnnnnnnnnnnnnnnnnnnnnnnnnnnnnnnnnnnnnnnnnnnnnnnnnnnnnnnnnnnnnnnnnnnnnnnnnnnnnnnnnnnnnnnnnnnnnnnnnnnnnnnnnnnnnnnnnnnnnnnnnnnnnnnnnnnnnnnnnnnnnnnnnnnnnnnnnnnnnnnnnnnnnnnnnnnnnnnnnnnnnnnnnnnnnnnnnnnnnnnnnnnnnnnnnnnnnnnnnnnnnnnnnnnnnnnnnnnnnnnnnnnnnnnnnnnnnnnnnnnnnnnnnnnnnnnnnnnnnnnnnnnnnnnnnnnnnnnnnnnnnnnnnnnnnnnnnnnnnnnnnnnnnnnnnnnnnnnnnnnnnnnnnnnnnnnnnnnnnnnnnnnnnnnnnnnnnnnnnnnnnnnnnnnnnnnnnnnnnnnnnnnnnnnnnnnnnnnnnnnnnnnnnnnnnnnnnnnnnnnnnnnnnnnnnnnnnnnnnnnnnnnnnnnnnnnnnnnnnnnnnnnnnnnnnnnnnnnnnnnnnnnnnnnnnnnnnnnnnnnnnnnnnnnnnnnnnnnnnnnnnnnnnnnnnnnnnnnnnnnnnnnnnnnnnnnnnnnnnnnnnnnnnnnnnnnnnnnnnnnnnnnnnnnnnnnnnnnnnnnnnnnnnnnnnnnnnnnnnnnnnnnnnnnnnnnnnnnnnnnnnnnnnnnnnnnnnnnnnnnnnnnnnnnnnnnnnnnnnnnnnnnnnnnnnnnnnnnnnnnnnnnnnnnnnnnnnnnnnnnnnnnnnnnnnnnnnnnnnnnnnnnnnnnnnnnnnnnnnnnnnnnnnnnnnnnnnnnnnnnnnnnnnnnnnnnnnnnnnnnnnnnnnnnnnnnnnnnnnnnnnnnnnnnnnnnnnnnnnnnnnnnnnnnnnnnnnnnnnnnnnnnnnnnnnnnnnnnnnnnnnnnnnnnnnnnnnnnnnnnnnnnnnnnnnnnnnnnnnnnnnnnnnnnnnnnnnnnnnnnnnnnnnnnnnnnnnnnnnnnnnnnnnnnnnnnnnnnnnnnnnnnnnnnnnnnnnnnnnnnnnnnnnnnnnnnnnnnnnnnnnnnnnnnnnnnnnnnnnnnnnnnnnnnnnnnnnnnnnnnnnnnnnnnnnnnnnnnnnnnnnnnnnnnnnnnnnnnnnnnnnnnnnnnnnnnnnnnnnnnnnnnnnnnnnnnnnnnnnnnnnnnnnnnnnnnnnnnnnnnnnnnnnnnnnnnnnnnnnnnnnnnnnnnnnnnnnnnnnnnnnnnnnnnnnnnnnnnnnnnnnnnnnnnnnnnnnnnnnnnnnnnnnnnnnnnnnnnnnnnnnnnnnnnnnnnnnnnnnnnnnnnnnnnnnnnnnnnnnnnnnnnnnnnnnnnnnnnnnnnnnnnnnnnnnnnnnnnnnnnnnnnnnnnnnnnnnnnnnnnnnnnnnnnnnnnnnnnnnnnnnnnnnnnnnnnnnnnnnnnnnnnnnnnnnnnnnnnnnnnnnnnnnnnnnnnnnnnnnnnnnnnnnnnnnnnnnnnnnnnnnnnnnnnnnnnnnnnnnnnnnnnnnnnnnnnnnnnnnnnnnnnnnnnnnnnnnnnnnnnnnnnnnnnnnnnnnnnnnnnnnnnnnnnnnnnnnnnnnnnnnnnnnnnnnnnnnnnnnnnnnnnnnnnnnnnnnnnnnnnnnnnnnnnnnnnnnnnnnnnnnnnnnnnnnnnnnnnnnnnnnnnnnnnnnnnnnnnnnnnnnnnnnnnnnnnnnnnnnnnnnnnnnnnnnnnnnnnnnnnnnnnnnnnnnnnnnnnnnnnnnnnnnnnnnnnnnnnnnnnnnnnnnnnnnnnnnnnnnnnnnnnnnnnnnnnnnnnnnnnnnnnnnnnnnnnnnnnnnnnnnnnnnnnnnnnnnnnnnnnnnnnnnnnnnnnnnnnnnnnnnnnnnnnnnnnnnnnnnnnnnnnnnnnnnnnnnnnnnnnnnnnnnnnnnnnnnnnnnnnnnnnnnnnnnnnnnnnnnnnnnnnnnnnnnnnnnnnnnnnnnnnnnnnnnnnnnnnnnnnnnnnnnnnnnnnnnnnnnnnnnnnnnnnnnnnnnnnnnnnnnnnnnnnnnnnnnnnnnnnnnnnnnnnnnnnnnnnnnnnnnnnnnnnnnnnnnnnnnnnnnnnnnnnnnnnnnnnnnnnnnnnnnnnnnnnnnnnnnnnnnnnnnnnnnnnnnnnnnnnnnnnnnnnnnnnnnnnnnnnnnnnnnnnnnnnnnnnnnnnnnnnnnnnnnnnnnnnnnnnnnnnnnnnnnnnnnnnnnnnnnnnnnnnnnnnnnnnnnnnnnnnnnnnnnnnnnnnnnnnnnnnnnnnnnnnnnnnnnnnnnnnnnnnnnnnnnnnnnnnnnnnnnnnnnnnnnnnnnnnnnnnnnnnnnnnnnnnnnnnnnnnnnnnnnnnnnnnnnnnnnnnnnnnnnnnnnnnnnnnnnnnnnnnnnnnnnnnnnnnnnnnnnnnnnnnnnnnnnnnnnnnnnnnnnnnnnnnnnnnnnnnnnnnnnnnnnnnnnnnnnnnnnnnnnnnnnnnnnnnnnnnnnnnnnnnnnnnnnnnnnnnnnnnnnnnnnnnnnnnnnnnnnnnnnnnnnnnnnnnnnnnnnnnnnnnnnnnnnnnnnnnnnnnnnnnnnnnnnnnnnnnnnnnnnnnnnnnnnnnnnnnnnnnnnnnnnnnnnnnnnnnnnnnnnnnnnnnnnnnnnnnnnnnnnnnnnnnnnnnnnnnnnnnnnnnnnnnnnnnnnnnnnnnnnnnnnnnnnnnnnnnnnnnnnnnnnnnnnnnnnnnnnnnnnnnnnnnnnnnnnnnnnnnnnnnnnnnnnnnnnnnnnnnnnnnnnnnnnnnnnnnnnnnnnnnnnnnnnnnnnnnnnnnnnnnnnnnnnnnnnnnnnnnnnnnnnnnnnnnnnnnnnnnnnnnnnnnnnnnnnnnnnnnnnnnnnnnnnnnnnnnnnnnnnnnnnnnnnnnnnnnnnnnnnnnnnnnnnnnnnnnnnnnnnnnnnnnnnnnnnnnnnnnnnnnnnnnnnnnnnnnnnnnnnnnnnnnnnnnnnnnnnnnnnnnnnnnnnnnnnnnnnnnnnnnnnnnnnnnnnnnnnnnnnnnnnnnnnnnnnnnnnnnnnnnnnnnnnnnnnnnnnnnnnnnnnnnnnnnnnnnnnnnnnnnnnnnnnnnnnnnnnnnnnnnnnnnnnnnnnnnnnnnnnnnnnnnnnnnnnnnnnnnnnnnnnnnnnnnnnnnnnnnnnnnnnnnnnnnnnnnnnnnnnnnnnnnnnnnnnnnnnnnnnnnnnnnnnnnnnnnnnnnnnnnnnnnnnnnnnnnnnnnnnnnnnnnnnnnnnnnnnnnnnnnnnnnnnnnnnnnnnnnnnnnnnnnnnnnnnnnnnnnnnnnnnnnnnnnnnnnnnnnnnnnnnnnnnnnnnnnnnnnnnnnnnnnnnnnnnnnnnnnnnnnnnnnnnnnnnnnnnnnnnnnnnnnnnnnnnnnnnnnnnnnnnnnnnnnnnnnnnnnnnnnnnnnnnnnnnnnnnnnnnnnnnnnnnnnnnnnnnnnnnnnnnnnnnnnnnnnnnnnnnnnnnnnnnnnnnnnnnnnnnnnnnnnnnnnnnnnnnnnnnnnnnnnnnnnnnnnnnnnnnnnnnnnnnnnnnnnnnnnnnnnnnnnnnnnnnnnnnnnnnnnnnnnnnnnnnnnnnnnnnnnnnnnnnnnnnnnnnnnnnnnnnnnnnnnnnnnnnnnnnnnnnnnnnnnnnnnnnnnnnnnnnnnnnnnnnnnnnnnnnnnnnnnnnnnnnnnnnnnnnnnnnnnnnnnnnnnnnnnnnnnnnnnnnnnnnnnnnnnnnnnnnnnnnnnnnnnnnnnnnnnnnnnnnnnnnnnnnnnnnnnnnnnnnnnnnnnnnnnnnnnnnnnnnnnnnnnnnnnnnnnnnnnnnnnnnnnnnnnnnnnnnnnnnnnnnnnnnnnnnnnnnnnnnnnnnnnnnnnnnnnnnnnnnnnnnnnnnnnnnnnnnnnnnnnnnnnnnnnnnnnnnnnnnnnnnnnnnnnnnnnnnnnnnnnnnnnnnnnnnnnnnnnnnnnnnnnnnnnnnnnnnnnnnnnnnnnnnnnnnnnnnnnnnnnnnnnnnnnnnnnnnnnnnnnnnnnnnnnnnnnnnnnnnnnnnnnnnnnnnnnnnnnnnnnnnnnnnnnnnnnnnnnnnnnnnnnnnnnnnnnnnnnnnnnnnnnnnnnnnnnnnnnnnnnnnnnnnnnnnnnnnnnnnnnnnnnnnnnnnnnnnnnnnnnnnnnnnnnnnnnnnnnnnnnnnnnnnnnnnnnnnnnnnnnnnnnnnnnnnnnnnnnnnnnnnnnnnnnnnnnnnnnnnnnnnnnnnnnnnnnnnnnnnnnnnnnnnnnnnnnnnnnnnnnnnnnnnnnnnnnnnnnnnnnnnnnnnnnnnnnnnnnnnnnnnnnnnnnnnnnnnnnnnnnnnnnnnnnnnnnnnnnnnnnnnnnnnnnnnnnnnnnnnnnnnnnnnnnnnnnnnnnnnnnnnnnnnnnnnnnnnnnnnnnnnnnnnnnnnnnnnnnnnnnnnnnnnnnnnnnnnnnnnnnnnnnnnnnnnnnnnnnnnnnnnnnnnnnnnnnnnnnnnnnnnnnnnnnnnnnnnnnnnnnnnnnnnnnnnnnnnnnnnnnnnnnnnnnnnnnnnnnnnnnnnnnnnnnnnnnnnnnnnnnnnnnnnnnnnnnnnnnnnnnnnnnnnnnnnnnnnnnnnnnnnnnnnnnnnnnnnnnnnnnnnnnnnnnnnnnnnnnnnnnnnnnnnnnnnnnnnnnnnnnnnnnnnnnnnnnnnnnnnnnnnnnnnnnnnnnnnnnnnnnnnnnnnnnnnnnnnnnnnnnnnnnnnnnnnnnnnnnnnnnnnnnnnnnnnnnnnnnnnnnnnnnnnnnnnnnnnnnnnnnnnnnnnnnnnnnnnnnnnnnnnnnnnnnnnnnnnnnnnnnnnnnnnnnnnnnnnnnnnnnnnnnnnnnnnnnnnnnnnnnnnnnnnnnnnnnnnnnnnnnnnnnnnnnnnnnnnnnnnnnnnnnnnnnnnnnnnnnnnnnnnnnnnnnnnnnnnnnnnnnnnnnnnnnnnnnnnnnnnnnnnnnnnnnnnnnnnnnnnnnnnnnnnnnnnnnnnnnnnnnnnnnnnnnnnnnnnnnnnnnnnnnnnnnnnnnnnnnnnnnnnnnnnnnnnnnnnnnnnnnnnnnnnnnnnnnnnnnnnnnnnnnnnnnnnnnnnnnnnnnnnnnnnnnnnnnnnnnnnnnnnnnnnnnnnnnnnnnnnnnnnnnnnnnnnnnnnnnnnnnnnnnnnnnnnnnnnnnnnnnnnnnnnnnnnnnnnnnnnnnnnnnnnnnnnnnnnnnnnnnnnnnnnnnnnnnnnnnnnnnnnnnnnnnnnnnnnnnnnnnnnnnnnnnnnnnnnnnnnnnnnnnnnnnnnnnnnnnnnnnnnnnnnnnnnnnnnnnnnnnnnnnnnnnnnnnnnnnnnnnnnnnnnnnnnnnnnnnnnnnnnnnnnnnnnnnnnnnnnnnnnnnnnnnnnnnnnnnnnnnnnnnnnnnnnnnnnnnnnnnnnnnnnnnnnnnnnnnnnnnnnnnnnnnnnnnnnnnnnnnnnnnnnnnnnnnnnnnnnnnnnnnnnnnnnnnnnnnnnnnnnnnnnnnnnnnnnnnnnnnnnnnnnnnnnnnnnnnnnnnnnnnnnnnnnnnnnnnnnnnnnnnnnnnnnnnnnnnnnnnnnnnnnnnnnnnnnnnnnnnnnnnnnnnnnnnnnnnnnnnnnnnnnnnnnnnnnnnnnnnnnnnnnnnnnnnnnnnnnnnnnnnnnnnnnnnnnnnnnnnnnnnnnnnnnnnnnnnnnnnnnnnnnnnnnnnnnnnnnnnnnnnnnnnnnnnnnnnnnnnnnnnnnnnnnnnnnnnnnnnnnnnnnnnnnnnnnnnnnnnnnnnnnnnnnnnnnnnnnnnnnnnnnnnnnnnnnnnnnnnnnnnnnnnnnnnnnnnnnnnnnnnnnnnnnnnnnnnnnnnnnnnnnnnnnnnnnnnnnnnnnnnnnnnnnnnnnnnnnnnnnnnnnnnnnnnnnnnnnnnnnnnnnnnnnnnnnnnnnnnnnnnnnnnnnnnnnnnnnnnnnnnnnnnnnnnnnnnnnnnnnnnnnnnnnnnnnnnnnnnnnnnnnnnnnnnnnnnnnnnnnnnnnnnnnnnnnnnnnnnnnnnnnnnnnnnnnnnnnnnnnnnnnnnnnnnnnnnnnnnnnnnnnnnnnnnnnnnnnnnnnnnnnnnnnnnnnnnnnnnnnnnnnnnnnnnnnnnnnnnnnnnnnnnnnnnnnnnnnnnnnnnnnnnnnnnnnnnnnnnnnnnnnnnnnnnnnnnnnnnnnnnnnnnnnnnnnnnnnnnnnnnnnnnnnnnnnnnnnnnnnnnnnnnnnnnnnnnnnnnnnnnnnnnnnnnnnnnnnnnnnnnnnnnnnnnnnnnnnnnnnnnnnnnnnnnnnnnnnnnnnnnnnnnnnnnnnnnnnnnnnnnnnnnnnnnnnnnnnnnnnnnnnnnnnnnnnnnnnnnnnnnnnnnnnnnnnnnnnnnnnnnnnnnnnnnnnnnnnnnnnnnnnnnnnnnnnnnnnnnnnnnnnnnnnnnnnnnnnnnnnnnnnnnnnnnnnnnnnnnnnnnnnnnnnnnnnnnnnnnnnnnnnnnnnnnnnnnnnnnnnnnnnnnnnnnnnnnnnnnnnnnnnnnnnnnnnnnnnnnnnnnnnnnnnnnnnnnnnnnnnnnnnnnnnnnnnnnnnnnnnnnnnnnnnnnnnnnnnnnnnnnnnnnnnnnnnnnnnnnnnnnnnnnnnnnnnnnnnnnnnnnnnnnnnnnnnnnnnnnnnnnnnnnnnnnnnnnnnnnnnnnnnnnnnnnnnnnnnnnnnnnnnnnnnnnnnnnnnnnnnnnnnnnnnnnnnnnnnnnnnnnnnnnnnnnnnnnnnnnnnnnnnnnnnnnnnnnnnnnnnnnnnnnnnnnnnnnnnnnnnnnnnnnnnnnnnnnnnnnnnnnnnnnnnnnnnnnnnnnnnnnnnnnnnnnnnnnnnnnnnnnnnnnnnnnnnnnnnnnnnnnnnnnnnnnnnnnnnnnnnnnnnnnnnnnnnnnnnnnnnnnnnnnnnnnnnnnnnnnnnnnnnnnnnnnnnnnnnnnnnnnnnnnnnnnnnnnnnnnnnnnnnnnnnnnnnnnnnnnnnnnnnnnnnnnnnnnnnnnnnnnnnnnnnnnnnnnnnnnnnnnnnnnnnnnnnnnnnnnnnnnnnnnnnnnnnnnnnnnnnnnnnnnnnnnnnnnnnnnnnnnnnnnnnnnnnnnnnnnnnnnnnnnnnnnnnnnnnnnnnnnnnnnnnnnnnnnnnnnnnnnnnnnnnnnnnnnnnnnnnnnnnnnnnnnnnnnnnnnnnnnnnnnnnnnnnnnnnnnnnnnnnnnnnnnnnnnnnnnnnnnnnnnnnnnnnnnnnnnnnnnnnnnnnnnnnnnnnnnnnnnnnnnnnnnnnnnnnnnnnnnnnnnnnnnnnnnnnnnnnnnnnnnnnnnnnnnnnnnnnnnnnnnnnnnnnnnnnnnnnnnnnnnnnnnnnnnnnnnnnnnnnnnnnnnnnnnnnnnnnnnnnnnnnnnnnnnnnnnnnnnnnnnnnnnnnnnnnnnnnnnnnnnnnnnnnnnnnnnnnnnnnnnnnnnnnnnnnnnnnnnnnnnnnnnnnnnnnnnnnnnnnnnnnnnnnnnnnnnnnnnnnnnnnnnnnnnnnnnnnnnnnnnnnnnnnnnnnnnnnnnnnnnnnnnnnnnnnnnnnnnnnnnnnnnnnnnnnnnnnnnnnnnnnnnnnnnnnnnnnnnnnnnnnnnnnnnnnnnnnnnnnnnnnnnnnnnnnnnnnnnnnnnnnnnnnnnnnnnnnnnnnnnnnnnnnnnnnnnnnnnnnnnnnnnnnnnnnnnnnnnnnnnnnnnnnnnnnnnnnnnnnnnnnnnnnnnnnnnnnnnnnnnnnnnnnnnnnnnnnnnnnnnnnnnnnnnnnnnnnnnnnnnnnnnnnnnnnnnnnnnnnnnnnnnnnnnnnnnnnnnnnnnnnnnnnnnnnnnnnnnnnnnnnnnnnnnnnnnnnnnnnnnnnnnnnnnnnnnnnnnnnnnnnnnnnnnnnnnnnnnnnnnnnnnnnnnnnnnnnnnnnnnnnnnnnnnnnnnnnnnnnnnnnnnnnnnnnnnnnnnnnnnnnnnnnnnnnnnnnnnnnnnnnnnnnnnnnnnnnnnnnnnnnnnnnnnnnnnnnnnnnnnnnnnnnnnnnnnnnnnnnnnnnnnnnnnnnnnnnnnnnnnnnnnnnnnnnnnnnnnnnnnnnnnnnnnnnnnnnnnnnnnnnnnnnnnnnnnnnnnnnnnnnnnnnnnnnnnnnnnnnnnnnnnnnnnnnnnnnnnnnnnnnnnnnnnnnnnnnnnnnnnnnnnnnnnnnnnnnnnnnnnnnnnnnnnnnnnnnnnnnnnnnnnnnnnnnnnnnnnnnnnnnnnnnnnnnnnnnnnnnnnnnnnnnnnnnnnnnnnnnnnnnnnnnnnnnnnnnnnnnnnnnnnnnnnnnnnnnnnnnnnnnnnnnnnnnnnnnnnnnnnnnnnnnnnnnnnnnnnnnnnnnnnnnnnnnnnnnnnnnnnnnnnnnnnnnnnnnnnnnnnnnnnnnnnnnnnnnnnnnnnnnnnnnnnnnnnnnnnnnnnnnnnnnnnnnnnnnnnnnnnnnnnnnnnnnnnnnnnnnnnnnnnnnnnnnnnnnnnnnnnnnnnnnnnnnnnnnnnnnnnnnnnnnnnnnnnnnnnnnnnnnnnnnnnnnnnnnnnnnnnnnnnnnnnnnnnnnnnnnnnnnnnnnnnnnnnnnnnnnnnnnnnnnnnnnnnnnnnnnnnnnnnnnnnnnnnnnnnnnnnnnnnnnnnnnnnnnnnnnnnnnnnnnnnnnnnnnnnnnnnnnnnnnnnnnnnnnnnnnnnnnnnnnnnnnnnnnnnnnnnnnnnnnnnnnnnnnnnnnnnnnnnnnnnnnnnnnnnnnnnnnnnnnnnnnnnnnnnnnnnnnnnnnnnnnnnnnnnnnnnnnnnnnnnnnnnnnnnnnnnnnnnnnnnnnnnnnnnnnnnnnnnnnnnnnnnnnnnnnnnnnnnnnnnnnnnnnnnnnnnnnnnnnnnnnnnnnnnnnnnnnnnnnnnnnnnnnnnnnnnnnnnnnnnnnnnnnnnnnnnnnnnnnnnnnnnnnnnnnnnnnnnnnnnnnnnnnnnnnnnnnnnnnnnnnnnnnnnnnnnnnnnnnnnnnnnnnnnnnnnnnnnnnnnnnnnnnnnnnnnnnnnnnnnnnnnnnnnnnnnnnnnnnnnnnnnnnnnnnnnnnnnnnnnnnnnnnnnnnnnnnnnnnnnnnnnnnnnnnnnnnnnnnnnnnnnnnnnnnnnnnnnnnnnnnnnnnnnnnnnnnnnnnnnnnnnnnnnnnnnnnnnnnnnnnnnnnnnnnnnnnnnnnnnnnnnnnnnnnnnnnnnnnnnnnnnnnnnnnnnnnnnnnnnnnnnnnnnnnnnnnnnnnnnnnnnnnnnnnnnnnnnnnnnnnnnnnnnnnnnnnnnnnnnnnnnnnnnnnnnnnnnnnnnnnnnnnnnnnnnnnnnnnnnnnnnnnnnnnnnnnnnnnnnnnnnnnnnnnnnnnnnnnnnnnnnnnnnnnnnnnnnnnnnnnnnnnnnnnnnnnnnnnnnnnnnnnnnnnnnnnnnnnnnnnnnnnnnnnnnnnnnnnnnnnnnnnnnnnnnnnnnnnnnnnnnnnnnnnnnnnnnnnnnnnnnnnnnnnnnnnnnnnnnnnnnnnnnnnnnnnnnnnnnnnnnnnnnnnnnnnnnnnnnnnnnnnnnnnnnnnnnnnnnnnnnnnnnnnnnnnnnnnnnnnnnnnnnnnnnnnnnnnnnnnnnnnnnnnnnnnnnnnnnnnnnnnnnnnnnnnnnnnnnnnnnnnnnnnnnnnnnnnnnnnnnnnnnnnnnnnnnnnnnnnnnnnnnnnnnnnnnnnnnnnnnnnnnnnnnnnnnnnnnnnnnnnnnnnnnnnnnnnnnnnnnnnnnnnnnnnnnnnnnnnnnnnnnnnnnnnnnnnnnnnnnnnnnnnnnnnnnnnnnnnnnnnnnnnnnnnnnnnnnnnnnnnnnnnnnnnnnnnnnnnnnnnnnnnnnnnnnnnnnnnnnnnnnnnnnnnnnnnnnnnnnnnnnnnnnnnnnnnnnnnnnnnnnnnnnnnnnnnnnnnnnnnnnnnnnnnnnnnnnnnnnnnnnnnnnnnnnnnnnnnnnnnnnnnnnnnnnnnnnnnnnnnnnnnnnnnnnnnnnnnnnnnnnnnnnnnnnnnnnnnnnnnnnnnnnnnnnnnnnnnnnnnnnnnnnnnnnnnnnnnnnnnnnnnnnnnnnnnnnnnnnnnnnnnnnnnnnnnnnnnnnnnnnnnnnnnnnnnnnnnnnnnnnnnnnnnnnnnnnnnnnnnnnnnnnnnnnnnnnnnnnnnnnnnnnnnnnnnnnnnnnnnnnnnnnnnnnnnnnnnnnnnnnnnnnnnnnnnnnnnnnnnnnnnnnnnnnnnnnnnnnnnnnnnnnnnnnnnnnnnnnnnnnnnnnnnnnnnnnnnnnnnnnnnnnnnnnnnnnnnnnnnnnnnnnnnnnnnnnnnnnnnnnnnnnnnnnnnnnnnnnnnnnnnnnnnnnnnnnnnnnnnnnnnnnnnnnnnnnnnnnnnnnnnnnnnnnnnnnnnnnnnnnnnnnnnnnnnnnnnnnnnnnnnnnnnnnnnnnnnnnnnnnnnnnnnnnnnnnnnnnnnnnnnnnnnnnnnnnnnnnnnnnnnnnnnnnnnnnnnnnnnnnnnnnnnnnnnnnnnnnnnnnnnnnnnnnnnnnnnnnnnnnnnnnnnnnnnnnnnnnnnnnnnnnnnnnnnnnnnnnnnnnnnnnnnnnnnnnnnnnnnnnnnnnnnnnnnnnnnnnnnnnnnnnnnnnnnnnnnnnnnnnnnnnnnnnnnnnnnnnnnnnnnnnnnnnnnnnnnnnnnnnnnnnnnnnnnnnnnnnnnnnnnnnnnnnnnnnnnnnnnnnnnnnnnnnnnnnnnnnnnnnnnnnnnnnnnnnnnnnnnnnnnnnnnnnnnnnnnnnnnnnnnnnnnnnnnnnnnnnnnnnnnnnnnnnnnnnnnnnnnnnnnnnnnnnnnnnnnnnnnnnnnnnnnnnnnnnnnnnnnnnnnnnnnnnnnnnnnnnnnnnnnnnnnnnnnnnnnnnnnnnnnnnnnnnnnnnnnnnnnnnnnnnnnnnnnnnnnnnnnnnnnnnnnnnnnnnnnnnnnnnnnnnnnnnnnnnnnnnnnnnnnnnnnnnnnnnnnnnnnnnnnnnnnnnnnnnnnnnnnnnnnnnnnnnnnnnnnnnnnnnnnnnnnnnnnnnnnnnnnnnnnnnnnnnnnnnnnnnnnnnnnnnnnnnnnnnnnnnnnnnnnnnnnnnnnnnnnnnnnnnnnnnnnnnnnnnnnnnnnnnnnnnnnnnnnnnnnnnnnnnnnnnnnnnnnnnnnnnnnnnnnnnnnnnnnnnnnnnnnnnnnnnnnnnnnnnnnnnnnnnnnnnnnnnnnnnnnnnnnnnnnnnnnnnnnnnnnnnnnnnnnnnnnnnnnnnnnnnnnnnnnnnnnnnnnnnnnnnnnnnnnnnnnnnnnnnnnnnnnnnnnnnnnnnnnnnnnnnnnnnnnnnnnnnnnnnnnnnnnnnnnnnnnnnnnnnnnnnnnnnnnnnnnnnnnnnnnnnnnnnnnnnnnnnnnnnnnnnnnnnnnnnnnnnnnnnnnnnnnnnnnnnnnnnnnnnnnnnnnnnnnnnnnnnnnnnnnnnnnnnnnnnnnnnnnnnnnnnnnnnnnnnnnnnnnnnnnnnnnnnnnnnnnnnnnnnnnnnnnnnnnnnnnnnnnnnnnnnnnnnnnnnnnnnnnnnnnnnnnnnnnnnnnnnnnnnnnnnnnnnnnnnnnnnnnnnnnnnnnnnnnnnnnnnnnnnnnnnnnnnnnnnnnnnnnnnnnnnnnnnnnnnnnnnnnnnnnnnnnnnnnnnnnnnnnnnnnnnnnnnnnnnnnnnnnnnnnnnnnnnnnnnnnnnnnnnnnnnnnnnnnnnnnnnnnnnnnnnnnnnnnnnnnnnnnnnnnnnnnnnnnnnnnnnnnnnnnnnnnnnnnnnnnnnnnnnnnnnnnnnnnnnnnnnnnnnnnnnnnnnnnnnnnnnnnnnnnnnnnnnnnnnnnnnnnnnnnnnnnnnnnnnnnnnnnnnnnnnnnnnnnnnnnnnnnnnnnnnnnnnnnnnnnnnnnnnnnnnnnnnnnnnnnnnnnnnnnnnnnnnnnnnnnnnnnnnnnnnnnnnnnnnnnnnnnnnnnnnnnnnnnnnnnnnnnnnnnnnnnnnnnnnnnnnnnnnnnnnnnnnnnnnnnnnnnnnnnnnnnnnnnnnnnnnnnnnnnnnnnnnnnnnnnnnnnnnnnnnnnnnnnnnnnnnnnnnnnnnnnnnnnnnnnnnnnnnnnnnnnnnnnnnnnnnnnnnnnnnnnnnnnnnnnnnnnnnnnnnnnnnnnnnnnnnnnnnnnnnnnnnnnnnnnnnnnnnnnnnnnnnnnnnnnnnnnnnnnnnnnnnnnnnnnnnnnnnnnnnnnnnnnnnnnnnnnnnnnnnnnnnnnnnnnnnnnnnnnnnnnnnnnnnnnnnnnnnnnnnnnnnnnnnnnnnnnnnnnnnnnnnnnnnnnnnnnnnnnnnnnnnnnnnnnnnnnnnnnnnnnnnnnnnnnnnnnnnnnnnnnnnnnnnnnnnnnnnnnnnnnnnnnnnnnnnnnnnnnnnnnnnnnnnnnnnnnnnnnnnnnnnnnnnnnnnnnnnnnnnnnnnnnnnnnnnnnnnnnnnnnnnnnnnnnnnnnnnnnnnnnnnnnnnnnnnnnnnnnnnnnnnnnnnnnnnnnnnnnnnnnnnnnnnnnnnnnnnnnnnnnnnnnnnnnnnnnnnnnnnnnnnnnnnnnnnnnnnnnnnnnnnnnnnnnnnnnnnnnnnnnnnnnnnnnnnnnnnnnnnnnnnnnnnnnnnnnnnnnnnnnnnnnnnnnnnnnnnnnnnnnnnnnnnnnnnnnnnnnnnnnnnnnnnnnnnnnnnnnnnnnnnnnnnnnnnnnnnnnnnnnnnnnnnnnnnnnnnnnnnnnnnnnnnnnnnnnnnnnnnnnnnnnnnnnnnnnnnnnnnnnnnnnnnnnnnnnnnnnnnnnnnnnnnnnnnnnnnnnnnnnnnnnnnnnnnnnnnnnnnnnnnnnnnnnnnnnnnnnnnnnnnnnnnnnnnnnnnnnnnnnnnnnnnnnnnnnnnnnnnnnnnnnnnnnnnnnnnnnnnnnnnnnnnnnnnnnnnnnnnnnnnnnnnnnnnnnnnnnnnnnnnnnnnnnnnnnnnnnnnnnnnnnnnnnnnnnnnnnnnnnnnnnnnnnnnnnnnnnnnnnnnnnnnnnnnnnnnnnnnnnnnnnnnnnnnnnnnnnnnnnnnnnnnnnnnnnnnnnnnnnnnnnnnnnnnnnnnnnnnnnnnnnnnnnnnnnnnnnnnnnnnnnnnnnnnnnnnnnnnnnnnnnnnnnnnnnnnnnnnnnnnnnnnnnnnnnnnnnnnnnnnnnnnnnnnnnnnnnnnnnnnnnnnnnnnnnnnnnnnnnnnnnnnnnnnnnnnnnnnnnnnnnnnnnnnnnnnnnnnnnnnnnnnnnnnnnnnnnnnnnnnnnnnnnnnnnnnnnnnnnnnnnnnnnnnnnnnnnnnnnnnnnnnnnnnnnnnnnnnnnnnnnnnnnnnnnnnnnnnnnnnnnnnnnnnnnnnnnnnnnnnnnnnnnnnnnnnnnnnnnnnnnnnnnnnnnnnnnnnnnnnnnnnnnnnnnnnnnnnnnnnnnnnnnnnnnnnnnnnnnnnnnnnnnnnnnnnnnnnnnnnnnnnnnnnnnnnnnnnnnnnnnnnnnnnnnnnnnnnnnnnnnnnnnnnnnnnnnnnnnnnnnnnnnnnnnnnnnnnnnnnnnnnnnnnnnnnnnnnnnnnnnnnnnnnnnnnnnnnnnnnnnnnnnnnnnnnnnnnnnnnnnnnnnnnnnnnnnnnnnnnnnnnnnnnnnnnnnnnnnnnnnnnnnnnnnnnnnnnnnnnnnnnnnnnnnnnnnnnnnnnnnnnnnnnnnnnnnnnnnnnnnnnnnnnnnnnnnnnnnnnnnnnnnnnnnnnnnnnnnnnnnnnnnnnnnnnnnnnnnnnnnnnnnnnnnnnnnnnnnnnnnnnnnnnnnnnnnnnnnnnnnnnnnnnnnnnnnnnnnnnnnnnnnnnnnnnnnnnnnnnnnnnnnnnnnnnnnnnnnnnnnnnnnnnnnnnnnnnnnnnnnnnnnnnnnnnnnnnnnnnnnnnnnnnnnnnnnnnnnnnnnnnnnnnnnnnnnnnnnnnnnnnnnnnnnnnnnnnnnnnnnnnnnnnnnnnnnnnnnnnnnnnnnnnnnnnnnnnnnnnnnnnnnnnnnnnnnnnnnnnnnnnnnnnnnnnnnnnnnnnnnnnnnnnnnnnnnnnnnnnnnnnnnnnnnnnnnnnnnnnnnnnnnnnnnnnnnnnnnnnnnnnnnnnnnnnnnnnnnnnnnnnnnnnnnnnnnnnnnnnnnnnnnnnnnnnnnnnnnnnnnnnnnnnnnnnnnnnnnnnnnnnnnnnnnnnnnnnnnnnnnnnnnnnnnnnnnnnnnnnnnnnnnnnnnnnnnnnnnnnnnnnnnnnnnnnnnnnnnnnnnnnnnnnnnnnnnnnnnnnnnnnnnnnnnnnnnnnnnnnnnnnnnnnnnnnnnnnnnnnnnnnnnnnnnnnnnnnnnnnnnnnnnnnnnnnnnnnnnnnnnnnnnnnnnnnnnnnnnnnnnnnnnnnnnnnnnnnnnnnnnnnnnnnnnnnnnnnnnnnnnnnnnnnnnnnnnnnnnnnnnnnnnnnnnnnnnnnnnnnnnnnnnnnnnnnnnnnnnnnnnnnnnnnnnnnnnnnnnnnnnnnnnnnnnnnnnnnnnnnnnnnnnnnnnnnnnnnnnnnnnnnnnnnnnnnnnnnnnnnnnnnnnnnnnnnnnnnnnnnnnnnnnnnnnnnnnnnnnnnnnnnnnnnnnnnnnnnnnnnnnnnnnnnnnnnnnnnnnnnnnnnnnnnnnnnnnnnnnnnnnnnnnnnnnnnnnnnnnnnnnnnnnnnnnnnnnnnnnnnnnnnnnnnnnnnnnnnnnnnnnnnnnnnnnnnnnnnnnnnnnnnnnnnnnnnnnnnnnnnnnnnnnnnnnnnnnnnnnnnnnnnnnnnnnnnnnnnnnnnnnnnnnnnnnnnnnnnnnnnnnnnnnnnnnnnnnnnnnnnnnnnnnnnnnnnnnnnnnnnnnnnnnnnnnnnnnnnnnnnnnnnnnnnnnnnnnnnnnnnnnnnnnnnnnnnnnnnnnnnnnnnnnnnnnnnnnnnnnnnnnnnnnnnnnnnnnnnnnnnnnnnnnnnnnnnnnnnnnnnnnnnnnnnnnnnnnnnnnnnnnnnnnnnnnnnnnnnnnnnnnnnnnnnnnnnnnnnnnnnnnnnnnnnnnnnnnnnnnnnnnnnnnnnnnnnnnnnnnnnnnnnnnnnnnnnnnnnnnnnnnnnnnnnnnnnnnnnnnnnnnnnnnnnnnnnnnnnnnnnnnnnnnnnnnnnnnnnnnnnnnnnnnnnnnnnnnnnnnnnnnnnnnnnnnnnnnnnnnnnnnnnnnnnnnnnnnnnnnnnnnnnnnnnnnnnnnnnnnnnnnnnnnnnnnnnnnnnnnnnnnnnnnnnnnnnnnnnnnnnnnnnnnnnnnnnnnnnnnnnnnnnnnnnnnnnnnnnnnnnnnnnnnnnnnnnnnnnnnnnnnnnnnnnnnnnnnnnnnnnnnnnnnnnnnnnnnnnnnnnnnnnnnnnnnnnnnnnnnnnnnnnnnnnnnnnnnnnnnnnnnnnnnnnnnnnnnnnnnnnnnnnnnnnnnnnnnnnnnnnnnnnnnnnnnnnnnnnnnnnnnnnnnnnnnnnnnnnnnnnnnnnnnnnnnnnnnnnnnnnnnnnnnnnnnnnnnnnnnnnnnnnnnnnnnnnnnnnnnnnnnnnnnnnnnnnnnnnnnnnnnnnnnnnnnnnnnnnnnnnnnnnnnnnnnnnnnnnnnnnnnnnnnnnnnnnnnnnnnnnnnnnnnnnnnnnnnnnnnnnnnnnnnnnnnnnnnnnnnnnnnnnnnnnnnnnnnnnnnnnnnnnnnnnnnnnnnnnnnnnnnnnnnnnnnnnnnnnnnnnnnnnnnnnnnnnnnnnnnnnnnnnnnnnnnnnnnnnnnnnnnnnnnnnnnnnnnnnnnnnnnnnnnnnnnnnnnnnnnnnnnnnnnnnnnnnnnnnnnnnnnnnnnnnnnnnnnnnnnnnnnnnnnnnnnnnnnnnnnnnnnnnnnnnnnnnnnnnnnnnnnnnnnnnnnnnnnnnnnnnnnnnnnnnnnnnnnnnnnnnnnnnnnnnnnnnnnnnnnnnnnnnnnnnnnnnnnnnnnnnnnnnnnnnnnnnnnnnnnnnnnnnnnnnnnnnnnnnnnnnnnnnnnnnnnnnnnnnnnnnnnnnnnnnnnnnnnnnnnnnnnnnnnnnnnnnnnnnnnnnnnnnnnnnnnnnnnnnnnnnnnnnnnnnnnnnnnnnnnnnnnnnnnnnnnnnnnnnnnnnnnnnnnnnnnnnnnnnnnnnnnnnnnnnnnnnnnnnnnnnnnnnnnnnnnnnnnnnnnnnnnnnnnnnnnnnnnnnnnnnnnnnnnnnnnnnnnnnnnnnnnnnnnnnnnnnnnnnnnnnnnnnnnnnnnnnnnnnnnnnnnnnnnnnnnnnnnnnnnnnnnnnnnnnnnnnnnnnnnnnnnnnnnnnnnnnnnnnnnnnnnnnnnnnnnnnnnnnnnnnnnnnnnnnnnnnnnnnnnnnnnnnnnnnnnnnnnnnnnnnnnnnnnnnnnnnnnnnnnnnnnnnnnnnnnnnnnnnnnnnnnnnnnnnnnnnnnnnnnnnnnnnnnnnnnnnnnnnnnnnnnnnnnnnnnnnnnnnnnnnnnnnnnnnnnnnnnnnnnnnnnnnnnnnnnnnnnnnnnnnnnnnnnnnnnnnnnnnnnnnnnnnnnnnnnnnnnnnnnnnnnnnnnnnnnnnnnnnnnnnnnnnnnnnnnnnnnnnnnnnnnnnnnnnnnnnnnnnnnnnnnnnnnnnnnnnnnnnnnnnnnnnnnnnnnnnnnnnnnnnnnnnnnnnnnnnnnnnnnnnnnnnnnnnnnnnnnnnnnnnnnnnnnnnnnnnnnnnnnnnnnnnnnnnnnnnnnnnnnnnnnnnnnnnnnnnnnnnnnnnnnnnnnnnnnnnnnnnnnnnnnnnnnnnnnnnnnnnnnnnnnnnnnnnnnnnnnnnnnnnnnnnnnnnnnnnnnnnnnnnnnnnnnnnnnnnnnnnnnnnnnnnnnnnnnnnnnnnnnnnnnnnnnnnnnnnnnnnnnnnnnnnnnnnnnnnnnnnnnnnnnnnnnnnnnnnnnnnnnnnnnnnnnnnnnnnnnnnnnnnnnnnnnnnnnnnnnnnnnnnnnnnnnnnnnnnnnnnnnnnnnnnnnnnnnnnnnnnnnnnnnnnnnnnnnnnnnnnnnnnnnnnnnnnnnnnnnnnnnnnnnnnnnnnnnnnnnnnnnnnnnnnnnnnnnnnnnnnnnnnnnnnnnnnnnnnnnnnnnnnnnnnnnnnnnnnnnnnnnnnnnnnnnnnnnnnnnnnnnnnnnnnnnnnnnnnnnnnnnnnnnnnnnnnnnnnnnnnnnnnnnnnnnnnnnnnnnnnnnnnnnnnnnnnnnnnnnnnnnnnnnnnnnnnnnnnnnnnnnnnnnnnnnnnnnnnnnnnnnnnnnnnnnnnnnnnnnnnnnnnnnnnnnnnnnnnnnnnnnnnnnnnnnnnnnnnnnnnnnnnnnnnnnnnnnnnnnnnnnnnnnnnnnnnnnnnnnnnnnnnnnnnnnnnnnnnnnnnnnnnnnnnnnnnnnnnnnnnnnnnnnnnnnnnnnnnnnnnnnnnnnnnnnnnnnnnnnnnnnnnnnnnnnnnnnnnnnnnnnnnnnnnnnnnnnnnnnnnnnnnnnnnnnnnnnnnnnnnnnnnnnnnnnnnnnnnnnnnnnnnnnnnnnnnnnnnnnnnnnnnnnnnnnnnnnnnnnnnnnnnnnnnnnnnnnnnnnnnnnnnnnnnnnnnnnnnnnnnnnnnnnnnnnnnnnnnnnnnnnnnnnnnnnnnnnnnnnnnnnnnnnnnnnnnnnnnnnnnnnnnnnnnnnnnnnnnnnnnnnnnnnnnnnnnnnnnnnnnnnnnnnnnnnnnnnnnnnnnnnnnnnnnnnnnnnnnnnnnnnnnnnnnnnnnnnnnnnnnnnnnnnnnnnnnnnnnnnnnnnnnnnnnnnnnnnnnnnnnnnnnnnnnnnnnnnnnnnnnnnnnnnnnnnnnnnnnnnnnnnnnnnnnnnnnnnnnnnnnnnnnnnnnnnnnnnnnnnnnnnnnnnnnnnnnnnnnnnnnnnnnnnnnnnnnnnnnnnnnnnnnnnnnnnnnnnnnnnnnnnnnnnnnnnnnnnnnnnnnnnnnnnnnnnnnnnnnnnnnnnnnnnnnnnnnnnnnnnnnnnnnnnnnnnnnnnnnnnnnnnnnnnnnnnnnnnnnnnnnnnnnnnnnnnnnnnnnnnnnnnnnnnnnnnnnnnnnnnnnnnnnnnnnnnnnnnnnnnnnnnnnnnnnnnnnnnnnnnnnnnnnnnnnnnnnnnnnnnnnnnnnnnnnnnnnnnnnnnnnnnnnnnnnnnnnnnnnnnnnnnnnnnnnnnnnnnnnnnnnnnnnnnnnnnnnnnnnnnnnnnnnnnnnnnnnnnnnnnnnnnnnnnnnnnnnnnnnnnnnnnnnnnnnnnnnnnnnnnnnnnnnnnnnnnnnnnnnnnnnnnnnnnnnnnnnnnnnnnnnnnnnnnnnnnnnnnnnnnnnnnnnnnnnnnnnnnnnnnnnnnnnnnnnnnnnnnnnnnnnnnnnnnnnnnnnnnnnnnnnnnnnnnnnnnnnnnnnnnnnnnnnnnnnnnnnnnnnnnnnnnnnnnnnnnnnnnnnnnnnnnnnnnnnnnnnnnnnnnnnnnnnnnnnnnnnnnnnnnnnnnnnnnnnnnnnnnnnnnnnnnnnnnnnnnnnnnnnnnnnnnnnnnnnnnnnnnnnnnnnnnnnnnnnnnnnnnnnnnnnnnnnnnnnnnnnnnnnnnnnnnnnnnnnnnnnnnnnnnnnnnnnnnnnnnnnnnnnnnnnnnnnnnnnnnnnnnnnnnnnnnnnnnnnnnnnnnnnnnnnnnnnnnnnnnnnnnnnnnnnnnnnnnnnnnnnnnnnnnnnnnnnnnnnnnnnnnnnnnnnnnnnnnnnnnnnnnnnnnnnnnnnnnnnnnnnnnnnnnnnnnnnnnnnnnnnnnnnnnnnnnnnnnnnnnnnnnnnnnnnnnnnnnnnnnnnnnnnnnnnnnnnnnnnnnnnnnnnnnnnnnnnnnnnnnnnnnnnnnnnnnnnnnnnnnnnnnnnnnnnnnnnnnnnnnnnnnnnnnnnnnnnnnnnnnnnnnnnnnnnnnnnnnnnnnnnnnnnnnnnnnnnnnnnnnnnnnnnnnnnnnnnnnnnnnnnnnnnnnnnnnnnnnnnnnnnnnnnnnnnnnnnnnnnnnnnnnnnnnnnnnnnnnnnnnnnnnnnnnnnnnnnnnnnnnnnnnnnnnnnnnnnnnnnnnnnnnnnnnnnnnnnnnnnnnnnnnnnnnnnnnnnnnnnnnnnnnnnnnnnnnnnnnnnnnnnnnnnnnnnnnnnnnnnnnnnnnnnnnnnnnnnnnnnnnnnnnnnnnnnnnnnnnnnnnnnnnnnnnnnnnnnnnnnnnnnnnnnnnnnnnnnnnnnnnnnnnnnnnnnnnnnnnnnnnnnnnnnnnnnnnnnnnnnnnnnnnnnnnnnnnnnnnnnnnnnnnnnnnnnnnnnnnnnnnnnnnnnnnnnnnnnnnnnnnnnnnnnnnnnnnnnnnnnnnnnnnnnnnnnnnnnnnnnnnnnnnnnnnnnnnnnnnnnnnnnnnnnnnnnnnnnnnnnnnnnnnnnnnnnnnnnnnnnnnnnnnnnnnnnnnnnnnnnnnnnnnnnnnnnnnnnnnnnnnnnnnnnnnnnnnnnnnnnnnnnnnnnnnnnnnnnnnnnnnnnnnnnnnnnnnnnnnnnnnnnnnnnnnnnnnnnnnnnnnnnnnnnnnnnnnnnnnnnnnnnnnnnnnnnnnnnnnnnnnnnnnnnnnnnnnnnnnnnnnnnnnnnnnnnnnnnnnnnnnnnnnnnnnnnnnnnnnnnnnnnnnnnnnnnnnnnnnnnnnnnnnnnnnnnnnnnnnnnnnnnnnnnnnnnnnnnnnnnnnnnnnnnnnnnnnnnnnnnnnnnnnnnnnnnnnnnnnnnnnnnnnnnnnnnnnnnnnnnnnnnnnnnnnnnnnnnnnnnnnnnnnnnnnnnnnnnnnnnnnnnnnnnnnnnnnnnnnnnnnnnnnnnnnnnnnnnnnnnnnnnnnnnnnnnnnnnnnnnnnnnnnnnnnnnnnnnnnnnnnnnnnnnnnnnnnnnnnnnnnnnnnnnnnnnnnnnnnnnnnnnnnnnnnnnnnnnnnnnnnnnnnnnnnnnnnnnnnnnnnnnnnnnnnnnnnnnnnnnnnnnnnnnnnnnnnnnnnnnnnnnnnnnnnnnnnnnnnnnnnnnnnnnnnnnnnnnnnnnnnnnnnnnnnnnnnnnnnnnnnnnnnnnnnnnnnnnnnnnnnnnnnnnnnnnnnnnnnnnnnnnnnnnnnnnnnnnnnnnnnnnnnnnnnnnnnnnnnnnnnnnnnnnnnnnnnnnnnnnnnnnnnnnnnnnnnnnnnnnnnnnnnnnnnnnnnnnnnnnnnnnnnnnnnnnnnnnnnnnnnnnnnnnnnnnnnnnnnnnnnnnnnnnnnnnnnnnnnnnnnnnnnnnnnnnnnnnnnnnnnnnnnnnnnnnnnnnnnnnnnnnnnnnnnnnnnnnnnnnnnnnnnnnnnnnnnnnnnnnnnnnnnnnnnnnnnnnnnnnnnnnnnnnnnnnnnnnnnnnnnnnnnnnnnnnnnnnnnnnnnnnnnnnnnnnnnnnnnnnnnnnnnnnnnnnnnnnnnnnnnnnnnnnnnnnnnnnnnnnnnnnnnnnnnnnnnnnnnnnnnnnnnnnnnnnnnnnnnnnnnnnnnnnnnnnnnnnnnnnnnnnnnnnnnnnnnnnnnnnnnnnnnnnnnnnnnnnnnnnnnnnnnnnnnnnnnnnnnnnnnnnnnnnnnnnnnnnnnnnnnnnnnnnnnnnnnnnnnnnnnnnnnnnnnnnnnnnnnnnnnnnnnnnnnnnnnnnnnnnnnnnnnnnnnnnnnnnnnnnnnnnnnnnnnnnnnnnnnnnnnnnnnnnnnnnnnnnnnnnnnnnnnnnnnnnnnnnnnnnnnnnnnnnnnnnnnnnnnnnnnnnnnnnnnnnnnnnnnnnnnnnnnnnnnnnnnnnnnnnnnnnnnnnnnnnnnnnnnnnnnnnnnnnnnnnnnnnnnnnnnnnnnnnnnnnnnnnnnnnnnnnnnnnnnnnnnnnnnnnnnnnnnnnnnnnnnnnnnnnnnnnnnnnnnnnnnnnnnnnnnnnnnnnnnnnnnnnnnnnnnnnnnnnnnnnnnnnnnnnnnnnnnnnnnnnnnnnnnnnnnnnnnnnnnnnnnnnnnnnnnnnnnnnnnnnnnnnnnnnnnnnnnnnnnnnnnnnnnnnnnnnnnnnnnnnnnnnnnnnnnnnnnnnnnnnnnnnnnnnnnnnnnnnnnnnnnnnnnnnnnnnnnnnnnnnnnnnnnnnnnnnnnnnnnnnnnnnnnnnnnnnnnnnnnnnnnnnnnnnnnnnnnnnnnnnnnnnnnnnnnnnnnnnnnnnnnnnnnnnnnnnnnnnnnnnnnnnnnnnnnnnnnnnnnnnnnnnnnnnnnnnnnnnnnnnnnnnnnnnnnnnnnnnnnnnnnnnnnnnnnnnnnnnnnnnnnnnnnnnnnnnnnnnnnnnnnnnnnnnnnnnnnnnnnnnnnnnnnnnnnnnnnnnnnnnnnnnnnnnnnnnnnnnnnnnnnnnnnnnnnnnnnnnnnnnnnnnnnnnnnnnnnnnnnnnnnnnnnnnnnnnnnnnnnnnnnnnnnnnnnnnnnnnnnnnnnnnnnnnnnnnnnnnnnnnnnnnnnnnnnnnnnnnnnnnnnnnnnnnnnnnnnnnnnnnnnnnnnnnnnnnnnnnnnnnnnnnnnnnnnnnnnnnnnnnnnnnnnnnnnnnnnnnnnnnnnnnnnnnnnnnnnnnnnnnnnnnnnnnnnnnnnnnnnnnnnnnnnnnnnnnnnnnnnnnnnnnnnnnnnnnnnnnnnnnnnnnnnnnnnnnnnnnnnnnnnnnnnnnnnnnnnnnnnnnnnnnnnnnnnnnnnnnnnnnnnnnnnnnnnnnnnnnnnnnnnnnnnnnnnnnnnnnnnnnnnnnnnnnnnnnnnnnnnnnnnnnnnnnnnnnnnnnnnnnnnnnnnnnnnnnnnnnnnnnnnnnnnnnnnnnnnnnnnnnnnnnnnnnnnnnnnnnnnnnnnnnnnnnnnnnnnnnnnnnnnnnnnnnnnnnnnnnnnnnnnnnnnnnnnnnnnnnnnnnnnnnnnnnnnnnnnnnnnnnnnnnnnnnnnnnnnnnnnnnnnnnnnnnnnnnnnnnnnnnnnnnnnnnnnnnnnnnnnnnnnnnnnnnnnnnnnnnnnnnnnnnnnnnnnnnnnnnnnnnnnnnnnnnnnnnnnnnnnnnnnnnnnnnnnnnnnnnnnnnnnnnnnnnnnnnnnnnnnnnnnnnnnnnnnnnnnnnnnnnnnnnnnnnnnnnnnnnnnnnnnnnnnnnnnnnnnnnnnnnnnnnnnnnnnnnnnnnnnnnnnnnnnnnnnnnnnnnnnnnnnnnnnnnnnnnnnnnnnnnnnnnnnnnnnnnnnnnnnnnnnnnnnnnnnnnnnnnnnnnnnnnnnnnnnnnnnnnnnnnnnnnnnnnnnnnnnnnnnnnnnnnnnnnnnnnnnnnnnnnnnnnnnnnnnnnnnnnnnnnnnnnnnnnnnnnnnnnnnnnnnnnnnnnnnnnnnnnnnnnnnnnnnnnnnnnnnnnnnnnnnnnnnnnnnnnnnnnnnnnnnnnnnnnnnnnnnnnnnnnnnnnnnnnnnnnnnnnnnnnnnnnnnnnnnnnnnnnnnnnnnnnnnnnnnnnnnnnnnnnnnnnnnnnnnnnnnnnnnnnnnnnnnnnnnnnnnnnnnnnnnnnnnnnnnnnnnnnnnnnnnnnnnnnnnnnnnnnnnnnnnnnnnnnnnnnnnnnnnnnnnnnnnnnnnnnnnnnnnnnnnnnnnnnnnnnnnnnnnnnnnnnnnnnnnnnnnnnnnnnnnnnnnnnnnnnnnnnnnnnnnnnnnnnnnnnnnnnnnnnnnnnnnnnnnnnnnnnnnnnnnnnnnnnnnnnnnnnnnnnnnnnnnnnnnnnnnnnnnnnnnnnnnnnnnnnnnnnnnnnnnnnnnnnnnnnnnnnnnnnnnnnnnnnnnnnnnnnnnnnnnnnnnnnnnnnnnnnnnnnnnnnnnnnnnnnnnnnnnnnnnnnnnnnnnnnnnnnnnnnnnnnnnnnnnnnnnnnnnnnnnnnnnnnnnnnnnnnnnnnnnnnnnnnnnnnnnnnnnnnnnnnnnnnnnnnnnnnnnnnnnnnnnnnnnnnnnnnnnnnnnnnnnnnnnnnnnnnnnnnnnnnnnnnnnnnnnnnnnnnnnnnnnnnnnnnnnnnnnnnnnnnnnnnnnnnnnnnnnnnnnnnnnnnnnnnnnnnnnnnnnnnnnnnnnnnnnnnnnnnnnnnnnnnnnnnnnnnnnnnnnnnnnnnnnnnnnnnnnnnnnnnnnnnnnnnnnnnnnnnnnnnnnnnnnnnnnnnnnnnnnnnnnnnnnnnnnnnnnnnnnnnnnnnnnnnnnnnnnnnnnnnnnnnnnnnnnnnnnnnnnnnnnnnnnnnnnnnnnnnnnnnnnnnnnnnnnnnnnnnnnnnnnnnnnnnnnnnnnnnnnnnnnnnnnnnnnnnnnnnnnnnnnnnnnnnnnnnnnnnnnnnnnnnnnnnnnnnnnnnnnnnnnnnnnnnnnnnnnnnnnnnnnnnnnnnnnnnnnnnnnnnnnnnnnnnnnnnnnnnnnnnnnnnnnnnnnnnnnnnnnnnnnnnnnnnnnnnnnnnnnnnnnnnnnnnnnnnnnnnnnnnnnnnnnnnnnnnnnnnnnnnnnnnnnnnnnnnnnnnnnnnnnnnnnnnnnnnnnnnnnnnnnnnnnnnnnnnnnnnnnnnnnnnnnnnnnnnnnnnnnnnnnnnnnnnnnnnnnnnnnnnnnnnnnnnnnnnnnnnnnnnnnnnnnnnnnnnnnnnnnnnnnnnnnnnnnnnnnnnnnnnnnnnnnnnnnnnnnnnnnnnnnnnnnnnnnnnnnnnnnnnnnnnnnnnnnnnnnnnnnnnnnnnnnnnnnnnnnnnnnnnnnnnnnnnnnnnnnnnnnnnnnnnnnnnnnnnnnnnnnnnnnnnnnnnnnnnnnnnnnnnnnnnnnnnnnnnnnnnnnnnnnnnnnnnnnnnnnnnnnnnnnnnnnnnnnnnnnnnnnnnnnnnnnnnnnnnnnnnnnnnnnnnnnnnnnnnnnnnnnnnnnnnnnnnnnnnnnnnnnnnnnnnnnnnnnnnnnnnnnnnnnnnnnnnnnnnnnnnnnnnnnnnnnnnnnnnnnnnnnnnnnnnnnnnnnnnnnnnnnnnnnnnnnnnnnnnnnnnnnnnnnnnnnnnnnnnnnnnnnnnnnnnnnnnnnnnnnnnnnnnnnnnnnnnnnnnnnnnnnnnnnnnnnnnnnnnnnnnnnnnnnnnnnnnnnnnnnnnnnnnnnnnnnnnnnnnnnnnnnnnnnnnnnnnnnnnnnnnnnnnnnnnnnnnnnnnnnnnnnnnnnnnnnnnnnnnnnnnnnnnnnnnnnnnnnnnnnnnnnnnnnnnnnnnnnnnnnnnnnnnnnnnnnnnnnnnnnnnnnnnnnnnnnnnnnnnnnnnnnnnnnnnnnnnnnnnnnnnnnnnnnnnnnnnnnnnnnnnnnnnnnnnnnnnnnnnnnnnnnnnnnnnnnnnnnnnnnnnnnnnnnnnnnnnnnnnnnnnnnnnnnnnnnnnnnnnnnnnnnnnnnnnnnnnnnnnnnnnnnnnnnnnnnnnnnnnnnnnnnnnnnnnnnnnnnnnnnnnnnnnnnnnnnnnnnnnnnnnnnnnnnnnnnnnnnnnnnnnnnnnnnnnnnnnnnnnnnnnnnnnnnnnnnnnnnnnnnnnnnnnnnnnnnnnnnnnnnnnnnnnnnnnnnnnnnnnnnnnnnnnnnnnnnnnnnnnnnnnnnnnnnnnnnnnnnnnnnnnnnnnnnnnnnnnnnnnnnnnnnnnnnnnnnnnnnnnnnnnnnnnnnnnnnnnnnnnnnnnnnnnnnnnnnnnnnnnnnnnnnnnnnnnnnnnnnnnnnnnnnnnnnnnnnnnnnnnnnnnnnnnnnnnnnnnnnnnnnnnnnnnnnnnnnnnnnnnnnnnnnnnnnnnnnnnnnnnnnnnnnnnnnnnnnnnnnnnnnnnnnnnnnnnnnnnnnnnnnnnnnnnnnnnnnnnnnnnnnnnnnnnnnnnnnnnnnnnnnnnnnnnnnnnnnnnnnnnnnnnnnnnnnnnnnnnnnnnnnnnnnnnnnnnnnnnnnnnnnnnnnnnnnnnnnnnnnnnnnnnnnnnnnnnnnnnnnnnnnnnnnnnnnnnnnnnnnnnnnnnnnnnnnnnnnnnnnnnnnnnnnnnnnnnnnnnnnnnnnnnnnnnnnnnnnnnnnnnnnnnnnnnnnnnnnnnnnnnnnnnnnnnnnnnnnnnnnnnnnnnnnnnnnnnnnnnnnnnnnnnnnnnnnnnnnnnnnnnnnnnnnnnnnnnnnnnnnnnnnnnnnnnnnnnnnnnnnnnnnnnnnnnnnnnnnnnnnnnnnnnnnnnnnnnnnnnnnnnnnnnnnnnnnnnnnnnnnnnnnnnnnnnnnnnnnnnnnnnnnnnnnnnnnnnnnnnnnnnnnnnnnnnnnnnnnnnnnnnnnnnnnnnnnnnnnnnnnnnnnnnnnnnnnnnnnnnnnnnnnnnnnnnnnnnnnnnnnnnnnnnnnnnnnnnnnnnnnnnnnnnnnnnnnnnnnnnnnnnnnnnnnnnnnnnnnnnnnnnnnnnnnnnnnnnnnnnnnnnnnnnnnnnnnnnnnnnnnnnnnnnnnnnnnnnnnnnnnnnnnnnnnnnnnnnnnnnnnnnnnnnnnnnnnnnnnnnnnnnnnnnnnnnnnnnnnnnnnnnnnnnnnnnnnnnnnnnnnnnnnnnnnnnnnnnnnnnnnnnnnnnnnnnnnnnnnnnnnnnnnnnnnnnnnnnnnnnnnnnnnnnnnnnnnnnnnnnnnnnnnnnnnnnnnnnnnnnnnnnnnnnnnnnnnnnnnnnnnnnnnnnnnnnnnnnnnnnnnnnnnnnnnnnnnnnnnnnnnnnnnnnnnnnnnnnnnnnnnnnnnnnnnnnnnnnnnnnnnnnnnnnnnnnnnnnnnnnnnnnnnnnnnnnnnnnnnnnnnnnnnnnnnnnnnnnnnnnnnnnnnnnnnnnnnnnnnnnnnnnnnnnnnnnnnnnnnnnnnnnnnnnnnnnnnnnnnnnnnnnnnnnnnnnnnnnnnnnnnnnnnnnnnnnnnnnnnnnnnnnnnnnnnnnnnnnnnnnnnnnnnnnnnnnnnnnnnnnnnnnnnnnnnnnnnnnnnnnnnnnnnnnnnnnnnnnnnnnnnnnnnnnnnnnnnnnnnnnnnnnnnnnnnnnnnnnnnnnnnnnnnnnnnnnnnnnnnnnnnnnnnnnnnnnnnnnnnnnnnnnnnnnnnnnnnnnnnnnnnnnnnnnnnnnnnnnnnnnnnnnnnnnnnnnnnnnnnnnnnnnnnnnnnnnnnnnnnnnnnnnnnnnnnnnnnnnnnnnnnnnnnnnnnnnnnnnnnnnnnnnnnnnnnnnnnnnnnnnnnnnnnnnnnnnnnnnnnnnnnnnnnnnnnnnnnnnnnnnnnnnnnnnnnnnnnnnnnnnnnnnnnnnnnnnnnnnnnnnnnnnnnnnnnnnnnnnnnnnnnnnnnnnnnnnnnnnnnnnnnnnnnnnnnnnnnnnnnnnnnnnnnnnnnnnnnnnnnnnnnnnnnnnnnnnnnnnnnnnnnnnnnnnnnnnnnnnnnnnnnnnnnnnnnnnnnnnnnnnnnnnnnnnnnnnnnnnnnnnnnnnnnnnnnnnnnnnnnnnnnnnnnnnnnnnnnnnnnnnnnnnnnnnnnnnnnnnnnnnnnnnnnnnnnnnnnnnnnnnnnnnnnnnnnnnnnnnnnnnnnnnnnnnnnnnnnnnnnnnnnnnnnnnnnnnnnnnnnnnnnnnnnnnnnnnnnnnnnnnnnnnnnnnnnnnnnnnnnnnnnnnnnnnnnnnnnnnnnnnnnnnnnnnnnnnnnnnnnnnnnnnnnnnnnnnnnnnnnnnnnnnnnnnnnnnnnnnnnnnnnnnnnnnnnnnnnnnnnnnnnnnnnnnnnnnnnnnnnnnnnnnnnnnnnnnnnnnnnnnnnnnnnnnnnnnnnnnnnnnnnnnnnnnnnnnnnnnnnnnnnnnnnnnnnnnnnnnnnnnnnnnnnnnnnnnnnnnnnnnnnnnnnnnnnnnnnnnnnnnnnnnnnnnnnnnnnnnnnnnnnnnnnnnnnnnnnnnnnnnnnnnnnnnnnnnnnnnnnnnnnnnnnnnnnnnnnnnnnnnnnnnnnnnnnnnnnnnnnnnnnnnnnnnnnnnnnnnnnnnnnnnnnnnnnnnnnnnnnnnnnnnnnnnnnnnnnnnnnnnnnnnnnnnnnnnnnnnnnnnnnnnnnnnnnnnnnnnnnnnnnnnnnnnnnnnnnnnnnnnnnnnnnnnnnnnnnnnnnnnnnnnnnnnnnnnnnnnnnnnnnnnnnnnnnnnnnnnnnnnnnnnnnnnnnnnnnnnnnnnnnnnnnnnnnnnnnnnnnnnnnnnnnnnnnnnnnnnnnnnnnnnnnnnnnnnnnnnnnnnnnnnnnnnnnnnnnnnnnnnnnnnnnnnnnnnnnnnnnnnnnnnnnnnnnnnnnnnnnnnnnnnnnnnnnnnnnnnnnnnnnnnnnnnnnnnnnnnnnnnnnnnnnnnnnnnnnnnnnnnnnnnnnnnnnnnnnnnnnnnnnnnnnnnnnnnnnnnnnnnnnnnnnnnnnnnnnnnnnnnnnnnnnnnnnnnnnnnnnnnnnnnnnnnnnnnnnnnnnnnnnnnnnnnnnnnnnnnnnnnnnnnnnnnnnnnnnnnnnnnnnnnnnnnnnnnnnnnnnnnnnnnnnnnnnnnnnnnnnnnnnnnnnnnnnnnnnnnnnnnnnnnnnnnnnnnnnnnnnnnnnnnnnnnnnnnnnnnnnnnnnnnnnnnnnnnnnnnnnnnnnnnnnnnnnnnnnnnnnnnnnnnnnnnnnnnnnnnnnnnnnnnnnnnnnnnnnnnnnnnnnnnnnnnnnnnnnnnnnnnnnnnnnnnnnnnnnnnnnnnnnnnnnnnnnnnnnnnnnnnnnnnnnnnnnnnnnnnnnnnnnnnnnnnnnnnnnnnnnnnnnnnnnnnnnnnnnnnnnnnnnnnnnnnnnnnnnnnnnnnnnnnnnnnnnnnnnnnnnnnnnnnnnnnnnnnnnnnnnnnnnnnnnnnnnnnnnnnnnnnnnnnnnnnnnnnnnnnnnnnnnnnnnnnnnnnnnnnnnnnnnnnnnnnnnnnnnnnnnnnnnnnnnnnnnnnnnnnnnnnnnnnnnnnnnnnnnnnnnnnnnnnnnnnnnnnnnnnnnnnnnnnnnnnnnnnnnnnnnnnnnnnnnnnnnnnnnnnnnnnnnnnnnnnnnnnnnnnnnnnnnnnnnnnnnnnnnnnnnnnnnnnnnnnnnnnnnnnnnnnnnnnnnnnnnnnnnnnnnnnnnnnnnnnnnnnnnnnnnnnnnnnnnnnnnnnnnnnnnnnnnnnnnnnnnnnnnnnnnnnnnnnnnnnnnnnnnnnnnnnnnnnnnnnnnnnnnnnnnnnnnnnnnnnnnnnnnnnnnnnnnnnnnnnnnnnnnnnnnnnnnnnnnnnnnnnnnnnnnnnnnnnnnnnnnnnnnnnnnnnnnnnnnnnnnnnnnnnnnnnnnnnnnnnnnnnnnnnnnnnnnnnnnnnnnnnnnnnnnnnnnnnnnnnnnnnnnnnnnnnnnnnnnnnnnnnnnnnnnnnnnnnnnnnnnnnnnnnnnnnnnnnnnnnnnnnnnnnnnnnnnnnnnnnnnnnnnnnnnnnnnnnnnnnnnnnnnnnnnnnnnnnnnnnnnnnnnnnnnnnnnnnnnnnnnnnnnnnnnnnnnnnnnnnnnnnnnnnnnnnnnnnnnnnnnnnnnnnnnnnnnnnnnnnnnnnnnnnnnnnnnnnnnnnnnnnnnnnnnnnnnnnnnnnnnnnnnnnnnnnnnnnnnnnnnnnnnnnnnnnnnnnnnnnnnnnnnnnnnnnnnnnnnnnnnnnnnnnnnnnnnnnnnnnnnnnnnnnnnnnnnnnnnnnnnnnnnnnnnnnnnnnnnnnnnnnnnnnnnnnnnnnnnnnnnnnnnnnnnnnnnnnnnnnnnnnnnnnnnnnnnnnnnnnnnnnnnnnnnnnnnnnnnnnnnnnnnnnnnnnnnnnnnnnnnnnnnnnnnnnnnnnnnnnnnnnnnnnnnnnnnnnnnnnnnnnnnnnnnnnnnnnnnnnnnnnnnnnnnnnnnnnnnnnnnnnnnnnnnnnnnnnnnnnnnnnnnnnnnnnnnnnnnnnnnnnnnnnnnnnnnnnnnnnnnnnnnnnnnnnnnnnnnnnnnnnnnnnnnnnnnnnnnnnnnnnnnnnnnnnnnnnnnnnnnnnnnnnnnnnnnnnnnnnnnnnnnnnnnnnnnnnnnnnnnnnnnnnnnnnnnnnnnnnnnnnnnnnnnnnnnnnnnnnnnnnnnnnnnnnnnnnnnnnnnnnnnnnnnnnnnnnnnnnnnnnnnnnnnnnnnnnnnnnnnnnnnnnnnnnnnnnnnnnnnnnnnnnnnnnnnnnnnnnnnnnnnnnnnnnnnnnnnnnnnnnnnnnnnnnnnnnnnnnnnnnnnnnnnnnnnnnnnnnnnnnnnnnnnnnnnnnnnnnnnnnnnnnnnnnnnnnnnnnnnnnnnnnnnnnnnnnnnnnnnnnnnnnnnnnnnnnnnnnnnnnnnnnnnnnnnnnnnnnnnnnnnnnnnnnnnnnnnnnnnnnnnnnnnnnnnnnnnnnnnnnnnnnnnnnnnnnnnnnnnnnnnnnnnnnnnnnnnnnnnnnnnnnnnnnnnnnnnnnnnnnnnnnnnnnnnnnnnnnnnnnnnnnnnnnnnnnnnnnnnnnnnnnnnnnnnnnnnnnnnnnnnnnnnnnnnnnnnnnnnnnnnnnnnnnnnnnnnnnnnnnnnnnnnnnnnnnnnnnnnnnnnnnnnnnnnnnnnnnnnnnnnnnnnnnnnnnnnnnnnnnnnnnnnnnnnnnnnnnnnnnnnnnnnnnnnnnnnnnnnnnnnnnnnnnnnnnnnnnnnnnnnnnnnnnnnnnnnnnnnnnnnnnnnnnnnnnnnnnnnnnnnnnnnnnnnnnnnnnnnnnnnnnnnnnnnnnnnnnnnnnnnnnnnnnnnnnnnnnnnnnnnnnnnnnnnnnnnnnnnnnnnnnnnnnnnnnnnnnnnnnnnnnnnnnnnnnnnnnnnnnnnnnnnnnnnnnnnnnnnnnnnnnnnnnnnnnnnnnnnnnnnnnnnnnnnnnnnnnnnnnnnnnnnnnnnnnnnnnnnnnnnnnnnnnnnnnnnnnnnnnnnnnnnnnnnnnnnnnnnnnnnnnnnnnnnnnnnnnnnnnnnnnnnnnnnnnnnnnnnnnnnnnnnnnnnnnnnnnnnnnnnnnnnnnnnnnnnnnnnnnnnnnnnnnnnnnnnnnnnnnnnnnnnnnnnnnnnnnnnnnnnnnnnnnnnnnnnnnnnnnnnnnnnnnnnnnnnnnnnnnnnnnnnnnnnnnnnnnnnnnnnnnnnnnnnnnnnnnnnnnnnnnnnnnnnnnnnnnnnnnnnnnnnnnnnnnnnnnnnnnnnnnnnnnnnnnnnnnnnnnnnnnnnnnnnnnnnnnnnnnnnnnnnnnnnnnnnnnnnnnnnnnnnnnnnnnnnnnnnnnnnnnnnnnnnnnnnnnnnnnnnnnnnnnnnnnnnnnnnnnnnnnnnnnnnnnnnnnnnnnnnnnnnnnnnnnnnnnnnnnnnnnnnnnnnnnnnnnnnnnnnnnnnnnnnnnnnnnnnnnnnnnnnnnnnnnnnnnnnnnnnnnnnnnnnnnnnnnnnnnnnnnnnnnnnnnnnnnnnnnnnnnnnnnnnnnnnnnnnnnnnnnnnnnnnnnnnnnnnnnnnnnnnnnnnnnnnnnnnnnnnnnnnnnnnnnnnnnnnnnnnnnnnnnnnnnnnnnnnnnnnnnnnnnnnnnnnnnnnnnnnnnnnnnnnnnnnnnnnnnnnnnnnnnnnnnnnnnnnnnnnnnnnnnnnnnnnnnnnnnnnnnnnnnnnnnnnnnnnnnnnnnnnnnnnnnnnnnnnnnnnnnnnnnnnnnnnnnnnnnnnnnnnnnnnnnnnnnnnnnnnnnnnnnnnnnnnnnnnnnnnnnnnnnnnnnnnnnnnnnnnnnnnnnnnnnnnnnnnnnnnnnnnnnnnnnnnnnnnnnnnnnnnnnnnnnnnnnnnnnnnnnnnnnnnnnnnnnnnnnnnnnnnnnnnnnnnnnnnnnnnnnnnnnnnnnnnnnnnnnnnnnnnnnnnnnnnnnnnnnnnnnnnnnnnnnnnnnnnnnnnnnnnnnnnnnnnnnnnnnnnnnnnnnnnnnnnnnnnnnnnnnnnnnnnnnnnnnnnnnnnnnnnnnnnnnnnnnnnnnnnnnnnnnnnnnnnnnnnnnnnnnnnnnnnnnnnnnnnnnnnnnnnnnnnnnnnnnnnnnnnnnnnnnnnnnnnnnnnnnnnnnnnnnnnnnnnnnnnnnnnnnnnnnnnnnnnnnnnnnnnnnnnnnnnnnnnnnnnnnnnnnnnnnnnnnnnnnnnnnnnnnnnnnnnnnnnnnnnnnnnnnnnnnnnnnnnnnnnnnnnnnnnnnnnnnnnnnnnnnnnnnnnnnnnnnnnnnnnnnnnnnnnnnnnnnnnnnnnnnnnnnnnnnnnnnnnnnnnnnnnnnnnnnnnnnnnnnnnnnnnnnnnnnnnnnnnnnnnnnnnnnnnnnnnnnnnnnnnnnnnnnnnnnnnnnnnnnnnnnnnnnnnnnnnnnnnnnnnnnnnnnnnnnnnnnnnnnnnnnnnnnnnnnnnnnnnnnnnnnnnnnnnnnnnnnnnnnnnnnnnnnnnnnnnnnnnnnnnnnnnnnnnnnnnnnnnnnnnnnnnnnnnnnnnnnnnnnnnnnnnnnnnnnnnnnnnnnnnnnnnnnnnnnnnnnnnnnnnnnnnnnnnnnnnnnnnnnnnnnnnnnnnnnnnnnnnnnnnnnnnnnnnnnnnnnnnnnnnnnnnnnnnnnnnnnnnnnnnnnnnnnnnnnnnnnnnnnnnnnnnnnnnnnnnnnnnnnnnnnnnnnnnnnnnnnnnnnnnnnnnnnnnnnnnnnnnnnnnnnnnnnnnnnnnnnnnnnnnnnnnnnnnnnnnnnnnnnnnnnnnnnnnnnnnnnnnnnnnnnnnnnnnnnnnnnnnnnnnnnnnnnnnnnnnnnnnnnnnnnnnnnnnnnnnnnnnnnnnnnnnnnnnnnnnnnnnnnnnnnnnnnnnnnnnnnnnnnnnnnnnnnnnnnnnnnnnnnnnnnnnnnnnnnnnnnnnnnnnnnnnnnnnnnnnnnnnnnnnnnnnnnnnnnnnnnnnnnnnnnnnnnnnnnnnnnnnnnnnnnnnnnnnnnnnnnnnnnnnnnnnnnnnnnnnnnnnnnnnnnnnnnnnnnnnnnnnnnnnnnnnnnnnnnnnnnnnnnnnnnnnnnnnnnnnnnnnnnnnnnnnnnnnnnnnnnnnnnnnnnnnnnnnnnnnnnnnnnnnnnnnnnnnnnnnnnnnnnnnnnnnnnnnnnnnnnnnnnnnnnnnnnnnnnnnnnnnnnnnnnnnnnnnnnnnnnnnnnnnnnnnnnnnnnnnnnnnnnnnnnnnnnnnnnnnnnnnnnnnnnnnnnnnnnnnnnnnnnnnnnnnnnnnnnnnnnnnnnnnnnnnnnnnnnnnnnnnnnnnnnnnnnnnnnnnnnnnnnnnnnnnnnnnnnnnnnnnnnnnnnnnnnnnnnnnnnnnnnnnnnnnnnnnnnnnnnnnnnnnnnnnnnnnnnnnnnnnnnnnnnnnnnnnnnnnnnnnnnnnnnnnnnnnnnnnnnnnnnnnnnnnnnnnnnnnnnnnnnnnnnnnnnnnnnnnnnnnnnnnnnnnnnnnnnnnnnnnnnnnnnnnnnnnnnnnnnnnnnnnnnnnnnnnnnnnnnnnnnnnnnnnnnnnnnnnnnnnnnnnnnnnnnnnnnnnnnnnnnnnnnnnnnnnnnnnnnnnnnnnnnnnnnnnnnnnnnnnnnnnnnnnnnnnnnnnnnnnnnnnnnnnnnnnnnnnnnnnnnnnnnnnnnnnnnnnnnnnnnnnnnnnnnnnnnnnnnnnnnnnnnnnnnnnnnnnnnnnnnnnnnnnnnnnnnnnnnnnnnnnnnnnnnnnnnnnnnnnnnnnnnnnnnnnnnnnnnnnnnnnnnnnnnnnnnnnnnnnnnnnnnnnnnnnnnnnnnnnnnnnnnnnnnnnnnnnnnnnnnnnnnnnnnnnnnnnnnnnnnnnnnnnnnnnnnnnnnnnnnnnnnnnnnnnnnnnnnnnnnnnnnnnnnnnnnnnnnnnnnnnnnnnnnnnnnnnnnnnnnnnnnnnnnnnnnnnnnnnnnnnnnnnnnnnnnnnnnnnnnnnnnnnnnnnnnnnnnnnnnnnnnnnnnnnnnnnnnnnnnnnnnnnnnnnnnnnnnnnnnnnnnnnnnnnnnnnnnnnnnnnnnnnnnnnnnnnnnnnnnnnnnnnnnnnnnnnnnnnnnnnnnnnnnnnnnnnnnnnnnnnnnnnnnnnnnnnnnnnnnnnnnnnnnnnnnnnnnnnnnnnnnnnnnnnnnnnnnnnnnnnnnnnnnnnnnnnnnnnnnnnnnnnnnnnnnnnnnnnnnnnnnnnnnnnnnnnnnnnnnnnnnnnnnnnnnnnnnnnnnnnnnnnnnnnnnnnnnnnnnnnnnnnnnnnnnnnnnnnnnnnnnnnnnnnnnnnnnnnnnnnnnnnnnnnnnnnnnnnnnnnnnnnnnnnnnnnnnnnnnnnnnnnnnnnnnnnnnnnnnnnnnnnnnnnnnnnnnnnnnnnnnnnnnnnnnnnnnnnnnnnnnnnnnnnnnnnnnnnnnnnnnnnnnnnnnnnnnnnnnnnnnnnnnnnnnnnnnnnnnnnnnnnnnnnnnnnnnnnnnnnnnnnnnnnnnnnnnnnnnnnnnnnnnnnnnnnnnnnnnnnnnnnnnnnnnnnnnnnnnnnnnnnnnnnnnnnnnnnnnnnnnnnnnnnnnnnnnnnnnnnnnnnnnnnnnnnnnnnnnnnnnnnnnnnnnnnnnnnnnnnnnnnnnnnnnnnnnnnnnnnnnnnnnnnnnnnnnnnnnnnnnnnnnnnnnnnnnnnnnnnnnnnnnnnnnnnnnnnnnnnnnnnnnnnnnnnnnnnnnnnnnnnnnnnnnnnnnnnnnnnnnnnnnnnnnnnnnnnnnnnnnnnnnnnnnnnnnnnnnnnnnnnnnnnnnnnnnnnnnnnnnnnnnnnnnnnnnnnnnnnnnnnnnnnnnnnnnnnnnnnnnnnnnnnnnnnnnnnnnnnnnnnnnnnnnnnnnnnnnnnnnnnnnnnnnnnnnnnnnnnnnnnnnnnnnnnnnnnnnnnnnnnnnnnnnnnnnnnnnnnnnnnnnnnnnnnnnnnnnnnnnnnnnnnnnnnnnnnnnnnnnnnnnnnnnnnnnnnnnnnnnnnnnnnnnnnnnnnnnnnnnnnnnnnnnnnnnnnnnnnnnnnnnnnnnnnnnnnnnnnnnnnnnnnnnnnnnnnnnnnnnnnnnnnnnnnnnnnnnnnnnnnnnnnnnnnnnnnnnnnnnnnnnnnnnnnnnnnnnnnnnnnnnnnnnnnnnnnnnnnnnnnnnnnnnnnnnnnnnnnnnnnnnnnnnnnnnnnnnnnnnnnnnnnnnnnnnnnnnnnnnnnnnnnnnnnnnnnnnnnnnnnnnnnnnnnnnnnnnnnnnnnnnnnnnnnnnnnnnnnnnnnnnnnnnnnnnnnnnnnnnnnnnnnnnnnnnnnnnnnnnnnnnnnnnnnnnnnnnnnnnnnnnnnnnnnnnnnnnnnnnnnnnnnnnnnnnnnnnnnnnnnnnnnnnnnnnnnnnnnnnnnnnnnnnnnnnnnnnnnnnnnnnnnnnnnnnnnnnnnnnnnnnnnnnnnnnnnnnnnnnnnnnnnnnnnnnnnnnnnnnnnnnnnnnnnnnnnnnnnnnnnnnnnnnnnnnnnnnnnnnnnnnnnnnnnnnnnnnnnnnnnnnnnnnnnnnnnnnnnnnnnnnnnnnnnnnnnnnnnnnnnnnnnnnnnnnnnnnnnnnnnnnnnnnnnnnnnnnnnnnnnnnnnnnnnnnnnnnnnnnnnnnnnnnnnnnnnnnnnnnnnnnnnnnnnnnnnnnnnnnnnnnnnnnnnnnnnnnnnnnnnnnnnnnnnnnnnnnnnnnnnnnnnnnnnnnnnnnnnnnnnnnnnnnnnnnnnnnnnnnnnnnnnnnnnnnnnnnnnnnnnnnnnnnnnnnnnnnnnnnnnnnnnnnnnnnnnnnnnnnnnnnnnnnnnnnnnnnnnnnnnnnnnnnnnnnnnnnnnnnnnnnnnnnnnnnnnnnnnnnnnnnnnnnnnnnnnnnnnnnnnnnnnnnnnnnnnnnnnnnnnnnnnnnnnnnnnnnnnnnnnnnnnnnnnnnnnnnnnnnnnnnnnnnnnnnnnnnnnnnnnnnnnnnnnnnnnnnnnnnnnnnnnnnnnnnnnnnnnnnnnnnnnnnnnnnnnnnnnnnnnnnnnnnnnnnnnnnnnnnnnnnnnnnnnnnnnnnnnnnnnnnnnnnnnnnnnnnnnnnnnnnnnnnnnnnnnnnnnnnnnnnnnnnnnnnnnnnnnnnnnnnnnnnnnnnnnnnnnnnnnnnnnnnnnnnnnnnnnnnnnnnnnnnnnnnnnnnnnnnnnnnnnnnnnnnnnnnnnnnnnnnnnnnnnnnnnnnnnnnnnnnnnnnnnnnnnnnnnnnnnnnnnnnnnnnnnnnnnnnnnnnnnnnnnnnnnnnnnnnnnnnnnnnnnnnnnnnnnnnnnnnnnnnnnnnnnnnnnnnnnnnnnnnnnnnnnnnnnnnnnnnnnnnnnnnnnnnnnnnnnnnnnnnnnnnnnnnnnnnnnnnnnnnnnnnnnnnnnnnnnnnnnnnnnnnnnnnnnnnnnnnnnnnnnnnnnnnnnnnnnnnnnnnnnnnnnnnnnnnnnnnnnnnnnnnnnnnnnnnnnnnnnnnnnnnnnnnnnnnnnnnnnnnnnnnnnnnnnnnnnnnnnnnnnnnnnnnnnnnnnnnnnnnnnnnnnnnnnnnnnnnnnnnnnnnnnnnnnnnnnnnnnnnnnnnnnnnnnnnnnnnnnnnnnnnnnnnnnnnnnnnnnnnnnnnnnnnnnnnnnnnnnnnnnnnnnnnnnnnnnnnnnnnnnnnnnnnnnnnnnnnnnnnnnnnnnnnnnnnnnnnnnnnnnnnnnnnnnnnnnnnnnnnnnnnnnnnnnnnnnnnnnnnnnnnnnnnnnnnnnnnnnnnnnnnnnnnnnnnnnnnnnnnnnnnnnnnnnnnnnnnnnnnnnnnnnnnnnnnnnnnnnnnnnnnnnnnnnnnnnnnnnnnnnnnnnnnnnnnnnnnnnnnnnnnnnnnnnnnnnnnnnnnnnnnnnnnnnnnnnnnnnnnnnnnnnnnnnnnnnnnnnnnnnnnnnnnnnnnnnnnnnnnnnnnnnnnnnnnnnnnnnnnnnnnnnnnnnnnnnnnnnnnnnnnnnnnnnnnnnnnnnnnnnnnnnnnnnnnnnnnnnnnnnnnnnnnnnnnnnnnnnnnnnnnnnnnnnnnnnnnnnnnnnnnnnnnnnnnnnnnnnnnnnnnnnnnnnnnnnnnnnnnnnnnnnnnnnnnnnnnnnnnnnnnnnnnnnnnnnnnnnnnnnnnnnnnnnnnnnnnnnnnnnnnnnnnnnnnnnnnnnnnnnnnnnnnnnnnnnnnnnnnnnnnnnnnnnnnnnnnnnnnnnnnnnnnnnnnnnnnnnnnnnnnnnnnnnnnnnnnnnnnnnnnnnnnnnnnnnnnnnnnnnnnnnnnnnnnnnnnnnnnnnnnnnnnnnnnnnnnnnnnnnnnnnnnnnnnnnnnnnnnnnnnnnnnnnnnnnnnnnnnnnnnnnnnnnnnnnnnnnnnnnnnnnnnnnnnnnnnnnnnnnnnnnnnnnnnnnnnnnnnnnnnnnnnnnnnnnnnnnnnnnnnnnnnnnnnnnnnnnnnnnnnnnnnnnnnnnnnnnnnnnnnnnnnnnnnnnnnnnnnnnnnnnnnnnnnnnnnnnnnnnnnnnnnnnnnnnnnnnnnnnnnnnnnnnnnnnnnnnnnnnnnnnnnnnnnnnnnnnnnnnnnnnnnnnnnnnnnnnnnnnnnnnnnnnnnnnnnnnnnnnnnnnnnnnnnnnnnnnnnnnnnnnnnnnnnnnnnnnnnnnnnnnnnnnnnnnnnnnnnnnnnnnnnnnnnnnnnnnnnnnnnnnnnnnnnnnnnnnnnnnnnnnnnnnnnnnnnnnnnnnnnnnnnnnnnnnnnnnnnnnnnnnnnnnnnnnnnnnnnnnnnnnnnnnnnnnnnnnnnnnnnnnnnnnnnnnnnnnnnnnnnnnnnnnnnnnnnnnnnnnnnnnnnnnnnnnnnnnnnnnnnnnnnnnnnnnnnnnnnnnnnnnnnnnnnnnnnnnnnnnnnnnnnnnnnnnnnnnnnnnnnnnnnnnnnnnnnnnnnnnnnnnnnnnnnnnnnnnnnnnnnnnnnnnnnnnnnnnnnnnnnnnnnnnnnnnnnnnnnnnnnnnnnnnnnnnnnnnnnnnnnnnnnnnnnnnnnnnnnnnnnnnnnnnnnnnnnnnnnnnnnnnnnnnnnnnnnnnnnnnnnnnnnnnnnnnnnnnnnnnnnnnnnnnnnnnnnnnnnnnnnnnnnnnnnnnnnnnnnnnnnnnnnnnnnnnnnnnnnnnnnnnnnnnnnnnnnnnnnnnnnnnnnnnnnnnnnnnnnnnnnnnnnnnnnnnnnnnnnnnnnnnnnnnnnnnnnnnnnnnnnnnnnnnnnnnnnnnnnnnnnnnnnnnnnnnnnnnnnnnnnnnnnnnnnnnnnnnnnnnnnnnnnnnnnnnnnnnnnnnnnnnnnnnnnnnnnnnnnnnnnnnnnnnnnnnnnnnnnnnnnnnnnnnnnnnnnnnnnnnnnnnnnnnnnnnnnnnnnnnnnnnnnnnnnnnnnnnnnnnnnnnnnnnnnnnnnnnnnnnnnnnnnnnnnnnnnnnnnnnnnnnnnnnnnnnnnnnnnnnnnnnnnnnnnnnnnnnnnnnnnnnnnnnnnnnnnnnnnnnnnnnnnnnnnnnnnnnnnnnnnnnnnnnnnnnnnnnnnnnnnnnnnnnnnnnnnnnnnnnnnnnnnnnnnnnnnnnnnnnnnnnnnnnnnnnnnnnnnnnnnnnnnnnnnnnnnnnnnnnnnnnnnnnnnnnnnnnnnnnnnnnnnnnnnnnnnnnnnnnnnnnnnnnnnnnnnnnnnnnnnnnnnnnnnnnnnnnnnnnnnnnnnnnnnnnnnnnnnnnnnnnnnnnnnnnnnnnnnnnnnnnnnnnnnnnnnnnnnnnnnnnnnnnnnnnnnnnnnnnnnnnnnnnnnnnnnnnnnnnnnnnnnnnnnnnnnnnnnnnnnnnnnnnnnnnnnnnnnnnnnnnnnnnnnnnnnnnnnnnnnnnnnnnnnnnnnnnnnnnnnnnnnnnnnnnnnnnnnnnnnnnnnnnnnnnnnnnnnnnnnnnnnnnnnnnnnnnnnnnnnnnnnnnnnnnnnnnnnnnnnnnnnnnnnnnnnnnnnnnnnnnnnnnnnnnnnnnnnnnnnnnnnnnnnnnnnnnnnnnnnnnnnnnnnnnnnnnnnnnnnnnnnnnnnnnnnnnnnnnnnnnnnnnnnnnnnnnnnnnnnnnnnnnnnnnnnnnnnnnnnnnnnnnnnnnnnnnnnnnnnnnnnnnnnnnnnnnnnnnnnnnnnnnnnnnnnnnnnnnnnnnnnnnnnnnnnnnnnnnnnnnnnnnnnnnnnnnnnnnnnnnnnnnnnnnnnnnnnnnnnnnnnnnnnnnnnnnnnnnnnnnnnnnnnnnnnnnnnnnnnnnnnnnnnnnnnnnnnnnnnnnnnnnnnnnnnnnnnnnnnnnnnnnnnnnnnnnnnnnnnnnnnnnnnnnnnnnnnnnnnnnnnnnnnnnnnnnnnnnnnnnnnnnnnnnnnnnnnnnnnnnnnnnnnnnnnnnnnnnnnnnnnnnnnnnnnnnnnnnnnnnnnnnnnnnnnnnnnnnnnnnnnnnnnnnnnnnnnnnnnnnnnnnnnnnnnnnnnnnnnnnnnnnnnnnnnnnnnnnnnnnnnnnnnnnnnnnnnnnnnnnnnnnnnnnnnnnnnnnnnnnnnnnnnnnnnnnnnnnnnnnnnnnnnnnnnnnnnnnnnnnnnnnnnnnnnnnnnnnnnnnnnnnnnnnnnnnnnnnnnnnnnnnnnnnnnnnnnnnnnnnnnnnnnnnnnnnnnnnnnnnnnnnnnnnnnnnnnnnnnnnnnnnnnnnnnnnnnnnnnnnnnnnnnnnnnnnnnnnnnnnnnnnnnnnnnnnnnnnnnnnnnnnnnnnnnnnnnnnnnnnnnnnnnnnnnnnnnnnnnnnnnnnnnnnnnnnnnnnnnnnnnnnnnnnnnnnnnnnnnnnnnnnnnnnnnnnnnnnnnnnnnnnnnnnnnnnnnnnnnnnnnnnnnnnnnnnnnnnnnnnnnnnnnnnnnnnnnnnnnnnnnnnnnnnnnnnnnnnnnnnnnnnnnnnnnnnnnnnnnnnnnnnnnnnnnnnnnnnnnnnnnnnnnnnnnnnnnnnnnnnnnnnnnnnnnnnnnnnnnnnnnnnnnnnnnnnnnnnnnnnnnnnnnnnnnnnnnnnnnnnnnnnnnnnnnnnnnnnnnnnnnnnnnnnnnnnnnnnnnnnnnnnnnnnnnnnnnnnnnnnnnnnnnnnnnnnnnnnnnnnnnnnnnnnnnnnnnnnnnnnnnnnnnnnnnnnnnnnnnnnnnnnnnnnnnnnnnnnnnnnnnnnnnnnnnnnnnnnnnnnnnnnnnnnnnnnnnnnnnnnnnnnnnnnnnnnnnnnnnnnnnnnnnnnnnnnnnnnnnnnnnnnnnnnnnnnnnnnnnnnnnnnnnnnnnnnnnnnnnnnnnnnnnnnnnnnnnnnnnnnnnnnnnnnnnnnnnnnnnnnnnnnnnnnnnnnnnnnnnnnnnnnnnnnnnnnnnnnnnnnnnnnnnnnnnnnnnnnnnnnnnnnnnnnnnnnnnnnnnnnnnnnnnnnnnnnnnnnnnnnnnnnnnnnnnnnnnnnnnnnnnnnnnnnnnnnnnnnnnnnnnnnnnnnnnnnnnnnnnnnnnnnnnnnnnnnnnnnnnnnnnnnnnnnnnnnnnnnnnnnnnnnnnnnnnnnnnnnnnnnnnnnnnnnnnnnnnnnnnnnnnnnnnnnnnnnnnnnnnnnnnnnnnnnnnnnnnnnnnnnnnnnnnnnnnnnnnnnnnnnnnnnnnnnnnnnnnnnnnnnnnnnnnnnnnnnnnnnnnnnnnnnnnnnnnnnnnnnnnnnnnnnnnnnnnnnnnnnnnnnnnnnnnnnnnnnnnnnnnnnnnnnnnnnnnnnnnnnnnnnnnnnnnnnnnnnnnnnnnnnnnnnnnnnnnnnnnnnnnnnnnnnnnnnnnnnnnnnnnnnnnnnnnnnnnnnnnnnnnnnnnnnnnnnnnnnnnnnnnnnnnnnnnnnnnnnnnnnnnnnnnnnnnnnnnnnnnnnnnnnnnnnnnnnnnnnnnnnnnnnnnnnnnnnnnnnnnnnnnnnnnnnnnnnnnnnnnnnnnnnnnnnnnnnnnnnnnnnnnnnnnnnnnnnnnnnnnnnnnnnnnnnnnnnnnnnnnnnnnnnnnnnnnnnnnnnnnnnnnnnnnnnnnnnnnnnnnnnnnnnnnnnnnnnnnnnnnnnnnnnnnnnnnnnnnnnnnnnnnnnnnnnnnnnnnnnnnnnnnnnnnnnnnnnnnnnnnnnnnnnnnnnnnnnnnnnnnnnnnnnnnnnnnnnnnnnnnnnnnnnnnnnnnnnnnnnnnnnnnnnnnnnnnnnnnnnnnnnnnnnnnnnnnnnnnnnnnnnnnnnnnnnnnnnnnnnnnnnnnnnnnnnnnnnnnnnnnnnnnnnnnnnnnnnnnnnnnnnnnnnnnnnnnnnnnnnnnnnnnnnnnnnnnnnnnnnnnnnnnnnnnnnnnnnnnnnnnnnnnnnnnnnnnnnnnnnnnnnnnnnnnnnnnnnnnnnnnnnnnnnnnnnnnnnnnnnnnnnnnnnnnnnnnnnnnnnnnnnnnnnnnnnnnnnnnnnnnnnnnnnnnnnnnnnnnnnnnnnnnnnnnnnnnnnnnnnnnnnnnnnnnnnnnnnnnnnnnnnnnnnnnnnnnnnnnnnnnnnnnnnnnnnnnnnnnnnnnnnnnnnnnnnnnnnnnnnnnnnnnnnnnnnnnnnnnnnnnnnnnnnnnnnnnnnnnnnnnnnnnnnnnnnnnnnnnnnnnnnnnnnnnnnnnnnnnnnnnnnnnnnnnnnnnnnnnnnnnnnnnnnnnnnnnnnnnnnnnnnnnnnnnnnnnnnnnnnnnnnnnnnnnnnnnnnnnnnnnnnnnnnnnnnnnnnnnnnnnnnnnnnnnnnnnnnnnnnnnnnnnnnnnnnnnnnnnnnnnnnnnnnnnnnnnnnnnnnnnnnnnnnnnnnnnnnnnnnnnnnnnnnnnnnnnnnnnnnnnnnnnnnnnnnnnnnnnnnnnnnnnnnnnnnnnnnnnnnnnnnnnnnnnnnnnnnnnnnnnnnnnnnnnnnnnnnnnnnnnnnnnnnnnnnnnnnnnnnnnnnnnnnnnnnnnnnnnnnnnnnnnnnnnnnnnnnnnnnnnnnnnnnnnnnnnnnnnnnnnnnnnnnnnnnnnnnnnnnnnnnnnnnnnnnnnnnnnnnnnnnnnnnnnnnnnnnnnnnnnnnnnnnnnnnnnnnnnnnnnnnnnnnnnnnnnnnnnnnnnnnnnnnnnnnnnnnnnnnnnnnnnnnnnnnnnnnnnnnnnnnnnnnnnnnnnnnnnnnnnnnnnnnnnnnnnnnnnnnnnnnnnnnnnnnnnnnnnnnnnnnnnnnnnnnnnnnnnnnnnnnnnnnnnnnnnnnnnnnnnnnnnnnnnnnnnnnnnnnnnnnnnnnnnnnnnnnnnnnnnnnnnnnnnnnnnnnnnnnnnnnnnnnnnnnnnnnnnnnnnnnnnnnnnnnnnnnnnnnnnnnnnnnnnnnnnnnnnnnnnnnnnnnnnnnnnnnnnnnnnnnnnnnnnnnnnnnnnnnnnnnnnnnnnnnnnnnnnnnnnnnnnnnnnnnnnnnnnnnnnnnnnnnnnnnnnnnnnnnnnnnnnnnnnnnnnnnnnnnnnnnnnnnnnnnnnnnnnnnnnnnnnnnnnnnnnnnnnnnnnnnnnnnnnnnnnnnnnnnnnnnnnnnnnnnnnnnnnnnnnnnnnnnnnnnnnnnnnnnnnnnnnnnnnnnnnnnnnnnnnnnnnnnnnnnnnnnnnnnnnnnnnnnnnnnnnnnnnnnnnnnnnnnnnnnnnnnnnnnnnnnnnnnnnnnnnnnnnnnnnnnnnnnnnnnnnnnnnnnnnnnnnnnnnnnnnnnnnnnnnnnnnnnnnnnnnnnnnnnnnnnnnnnnnnnnnnnnnnnnnnnnnnnnnnnnnnnnnnnnnnnnnnnnnnnnnnnnnnnnnnnnnnnnnnnnnnnnnnnnnnnnnnnnnnnnnnnnnnnnnnnnnnnnnnnnnnnnnnnnnnnnnnnnnnnnnnnnnnnnnnnnnnnnnnnnnnnnnnnnnnnnnnnnnnnnnnnnnnnnnnnnnnnnnnnnnnnnnnnnnnnnnnnnnnnnnnnnnnnnnnnnnnnnnnnnnnnnnnnnnnnnnnnnnnnnnnnnnnnnnnnnnnnnnnnnnnnnnnnnnnnnnnnnnnnnnnnnnnnnnnnnnnnnnnnnnnnnnnnnnnnnnnnnnnnnnnnnnnnnnnnnnnnnnnnnnnnnnnnnnnnnnnnnnnnnnnnnnnnnnnnnnnnnnnnnnnnnnnnnnnnnnnnnnnnnnnnnnnnnnnnnnnnnnnnnnnnnnnnnnnnnnnnnnnnnnnnnnnnnnnnnnnnnnnnnnnnnnnnnnnnnnnnnnnnnnnnnnnnnnnnnnnnnnnnnnnnnnnnnnnnnnnnnnnnnnnnnnnnnnnnnnnnnnnnnnnnnnnnnnnnnnnnnnnnnnnnnnnnnnnnnnnnnnnnnnnnnnnnnnnnnnnnnnnnnnnnnnnnnnnnnnnnnnnnnnnnnnnnnnnnnnnnnnnnnnnnnnnnnnnnnnnnnnnnnnnnnnnnnnnnnnnnnnnnnnnnnnnnnnnnnnnnnnnnnnnnnnnnnnnnnnnnnnnnnnnnnnnnnnnnnnnnnnnnnnnnnnnnnnnnnnnnnnnnnnnnnnnnnnnnnnnnnnnnnnnnnnnnnnnnnnnnnnnnnnnnnnnnnnnnnnnnnnnnnnnnnnnnnnnnnnnnnnnnnnnnnnnnnnnnnnnnnnnnnnnnnnnnnnnnnnnnnnnnnnnnnnnnnnnnnnnnnnnnnnnnnnnnnnnnnnnnnnnnnnnnnnnnnnnnnnnnnnnnnnnnnnnnnnnnnnnnnnnnnnnnnnnnnnnnnnnnnnnnnnnnnnnnnnnnnnnnnnnnnnnnnnnnnnnnnnnnnnnnnnnnnnnnnnnnnnnnnnnnnnnnnnnnnnnnnnnnnnnnnnnnnnnnnnnnnnnnnnnnnnnnnnnnnnnnnnnnnnnnnnnnnnnnnnnnnnnnnnnnnnnnnnnnnnnnnnnnnnnnnnnnnnnnnnnnnnnnnnnnnnnnnnnnnnnnnnnnnnnnnnnnnnnnnnnnnnnnnnnnnnnnnnnnnnnnnnnnnnnnnnnnnnnnnnnnnnnnnnnnnnnnnnnnnnnnnnnnnnnnnnnnnnnnnnnnnnnnnnnnnnnnnnnnnnnnnnnnnnnnnnnnnnnnnnnnnnnnnnnnnnnnnnnnnnnnnnnnnnnnnnnnnnnnnnnnnnnnnnnnnnnnnnnnnnnnnnnnnnnnnnnnnnnnnnnnnnnnnnnnnnnnnnnnnnnnnnnnnnnnnnnnnnnnnnnnnnnnnnnnnnnnnnnnnnnnnnnnnnnnnnnnnnnnnnnnnnnnnnnnnnnnnnnnnnnnnnnnnnnnnnnnnnnnnnnnnnnnnnnnnnnnnnnnnnnnnnnnnnnnnnnnnnnnnnnnnnnnnnnnnnnnnnnnnnnnnnnnnnnnnnnnnnnnnnnnnnnnnnnnnnnnnnnnnnnnnnnnnnnnnnnnnnnnnnnnnnnnnnnnnnnnnnnnnnnnnnnnnnnnnnnnnnnnnnnnnnnnnnnnnnnnnnnnnnnnnnnnnnnnnnnnnnnnnnnnnnnnnnnnnnnnnnnnnnnnnnnnnnnnnnnnnnnnnnnnnnnnnnnnnnnnnnnnnnnnnnnnnnnnnnnnnnnnnnnnnnnnnnnnnnnnnnnnnnnnnnnnnnnnnnnnnnnnnnnnnnnnnnnnnnnnnnnnnnnnnnnnnnnnnnnnnnnnnnnnnnnnnnnnnnnnnnnnnnnnnnnnnnnnnnnnnnnnnnnnnnnnnnnnnnnnnnnnnnnnnnnnnnnnnnnnnnnnnnnnnnnnnnnnnnnnnnnnnnnnnnnnnnnnnnnnnnnnnnnnnnnnnnnnnnnnnnnnnnnnnnnnnnnnnnnnnnnnnnnnnnnnnnnnnnnnnnnnnnnnnnnnnnnnnnnnnnnnnnnnnnnnnnnnnnnnnnnnnnnnnnnnnnnnnnnnnnnnnnnnnnnnnnnnnnnnnnnnnnnnnnnnnnnnnnnnnnnnnnnnnnnnnnnnnnnnnnnnnnnnnnnnnnnnnnnnnnnnnnnnnnnnnnnnnnnnnnnnnnnnnnnnnnnnnnnnnnnnnnnnnnnnnnnnnnnnnnnnnnnnnnnnnnnnnnnnnnnnnnnnnnnnnnnnnnnnnnnnnnnnnnnnnnnnnnnnnnnnnnnnnnnnnnnnnnnnnnnnnnnnnnnnnnnnnnnnnnnnnnnnnnnnnnnnnnnnnnnnnnnnnnnnnnnnnnnnnnnnnnnnnnnnnnnnnnnnnnnnnnnnnnnnnnnnnnnnnnnnnnnnnnnnnnnnnnnnnnnnnnnnnnnnnnnnnnnnnnnnnnnnnnnnnnnnnnnnnnnnnnnnnnnnnnnnnnnnnnnnnnnnnnnnnnnnnnnnnnnnnnnnnnnnnnnnnnnnnnnnnnnnnnnnnnnnnnnnnnnnnnnnnnnnnnnnnnnnnnnnnnnnnnnnnnnnnnnnnnnnnnnnnnnnnnnnnnnnnnnnnnnnnnnnnnnnnnnnnnnnnnnnnnnnnnnnnnnnnnnnnnnnnnnnnnnnnnnnnnnnnnnnnnnnnnnnnnnnnnnnnnnnnnnnnnnnnnnnnnnnnnnnnnnnnnnnnnnnnnnnnnnnnnnnnnnnnnnnnnnnnnnnnnnnnnnnnnnnnnnnnnnnnnnnnnnnnnnnnnnnnnnnnnnnnnnnnnnnnnnnnnnnnnnnnnnnnnnnnnnnnnnnnnnnnnnnnnnnnnnnnnnnnnnnnnnnnnnnnnnnnnnnnnnnnnnnnnnnnnnnnnnnnnnnnnnnnnnnnnnnnnnnnnnnnnnnnnnnnnnnnnnnnnnnnnnnnnnnnnnnnnnnnnnnnnnnnnnnnnnnnnnnnnnnnnnnnnnnnnnnnnnnnnnnnnnnnnnnnnnnnnnnnnnnnnnnnnnnnnnnnnnnnnnnnnnnnnnnnnnnnnnnnnnnnnnnnnnnnnnnnnnnnnnnnnnnnnnnnnnnnnnnnnnnnnnnnnnnnnnnnnnnnnnnnnnnnnnnnnnnnnnnnnnnnnnnnnnnnnnnnnnnnnnnnnnnnnnnnnnnnnnnnnnnnnnnnnnnnnnnnnnnnnnnnnnnnnnnnnnnnnnnnnnnnnnnnnnnnnnnnnnnnnnnnnnnnnnnnnnnnnnnnnnnnnnnnnnnnnnnnnnnnnnnnnnnnnnnnnnnnnnnnnnnnnnnnnnnnnnnnnnnnnnnnnnnnnnnnnnnnnnnnnnnnnnnnnnnnnnnnnnnnnnnnnnnnnnnnnnnnnnnnnnnnnnnnnnnnnnnnnnnnnnnnnnnnnnnnnnnnnnnnnnnnnnnnnnnnnnnnnnnnnnnnnnnnnnnnnnnnnnnnnnnnnnnnnnnnnnnnnnnnnnnnnnnnnnnnnnnnnnnnnnnnnnnnnnnnnnnnnnnnnnnnnnnnnnnnnnnnnnnnnnnnnnnnnnnnnnnnnnnnnnnnnnnnnnnnnnnnnnnnnnnnnnnnnnnnnnnnnnnnnnnnnnnnnnnnnnnnnnnnnnnnnnnnnnnnnnnnnnnnnnnnnnnnnnnnnnnnnnnnnnnnnnnnnnnnnnnnnnnnnnnnnnnnnnnnnnnnnnnnnnnnnnnnnnnnnnnnnnnnnnnnnnnnnnnnnnnnnnnnnnnnnnnnnnnnnnnnnnnnnnnnnnnnnnnnnnnnnnnnnnnnnnnnnnnnnnnnnnnnnnnnnnnnnnnnnnnnnnnnnnnnnnnnnnnnnnnnnnnnnnnnnnnnnnnnnnnnnnnnnnnnnnnnnnnnnnnnnnnnnnnnnnnnnnnnnnnnnnnnnnnnnnnnnnnnnnnnnnnnnnnnnnnnnnnnnnnnnnnnnnnnnnnnnnnnnnnnnnnnnnnnnnnnnnnnnnnnnnnnnnnnnnnnnnnnnnnnnnnnnnnnnnnnnnnnnnnnnnnnnnnnnnnnnnnnnnnnnnnnnnnnnnnnnnnnnnnnnnnnnnnnnnnnnnnnnnnnnnnnnnnnnnnnnnnnnnnnnnnnnnnnnnnnnnnnnnnnnnnnnnnnnnnnnnnnnnnnnnnnnnnnnnnnnnnnnnnnnnnnnnnnnnnnnnnnnnnnnnnnnnnnnnnnnnnnnnnnnnnnnnnnnnnnnnnnnnnnnnnnnnnnnnnnnnnnnnnnnnnnnnnnnnnnnnnnnnnnnnnnnnnnnnnnnnnnnnnnnnnnnnnnnnnnnnnnnnnnnnnnnnnnnnnnnnnnnnnnnnnnnnnnnnnnnnnnnnnnnnnnnnnnnnnnnnnnnnnnnnnnnnnnnnnnnnnnnnnnnnnnnnnnnnnnnnnnnnnnnnnnnnnnnnnnnnnnnnnnnnnnnnnnnnnnnnnnnnnnnnnnnnnnnnnnnnnnnnnnnnnnnnnnnnnnnnnnnnnnnnnnnnnnnnnnnnnnnnnnnnnnnnnnnnnnnnnnnnnnnnnnnnnnnnnnnnnnnnnnnnnnnnnnnnnnnnnnnnnnnnnnnnnnnnnnnnnnnnnnnnnnnnnnnnnnnnnnnnnnnnnnnnnnnnnnnnnnnnnnnnnnnnnnnnnnnnnnnnnnnnnnnnnnnnnnnnnnnnnnnnnnnnnnnnnnnnnnnnnnnnnnnnnnnnnnnnnnnnnnnnnnnnnnnnnnnnnnnnnnnnnnnnnnnnnnnnnnnnnnnnnnnnnnnnnnnnnnnnnnnnnnnnnnnnnnnnnnnnnnnnnnnnnnnnnnnnnnnnnnnnnnnnnnnnnnnnnnnnnnnnnnnnnnnnnnnnnnnnnnnnnnnnnnnnnnnnnnnnnnnnnnnnnnnnnnnnnnnnnnnnnnnnnnnnnnnnnnnnnnnnnnnnnnnnnnnnnnnnnnnnnnnnnnnnnnnnnnnnnnnnnnnnnnnnnnnnnnnnnnnnnnnnnnnnnnnnnnnnnnnnnnnnnnnnnnnnnnnnnnnnnnnnnnnnnnnnnnnnnnnnnnnnnnnnnnnnnnnnnnnnnnnnnnnnnnnnnnnnnnnnnnnnnnnnnnnnnnnnnnnnnnnnnnnnnnnnnnnnnnnnnnnnnnnnnnnnnnnnnnnnnnnnnnnnnnnnnnnnnnnnnnnnnnnnnnnnnnnnnnnnnnnnnnnnnnnnnnnnnnnnnnnnnnnnnnnnnnnnnnnnnnnnnnnnnnnnnnnnnnnnnnnnnnnnnnnnnnnnnnnnnnnnnnnnnnnnnnnnnnnnnnnnnnnnnnnnnnnnnnnnnnnnnnnnnnnnnnnnnnnnnnnnnnnnnnnnnnnnnnnnnnnnnnnnnnnnnnnnnnnnnnnnnnnnnnnnnnnnnnnnnnnnnnnnnnnnnnnnnnnnnnnnnnnnnnnnnnnnnnnnnnnnnnnnnnnnnnnnnnnnnnnnnnnnnnnnnnnnnnnnnnnnnnnnnnnnnnnnnnnnnnnnnnnnnnnnnnnnnnnnnnnnnnnnnnnnnnnnnnnnnnnnnnnnnnnnnnnnnnnnnnnnnnnnnnnnnnnnnnnnnnnnnnnnnnnnnnnnnnnnnnnnnnnnnnnnnnnnnnnnnnnnnnnnnnnnnnnnnnnnnnnnnnnnnnnnnnnnnnnnnnnnnnnnnnnnnnnnnnnnnnnnnnnnnnnnnnnnnnnnnnnnnnnnnnnnnnnnnnnnnnnnnnnnnnnnnnnnnnnnnnnnnnnnnnnnnnnnnnnnnnnnnnnnnnnnnnnnnnnnnnnnnnnnnnnnnnnnnnnnnnnnnnnnnnnnnnnnnnnnnnnnnnnnnnnnnnnnnnnnnnnnnnnnnnnnnnnnnnnnnnnnnnnnnnnnnnnnnnnnnnnnnnnnnnnnnnnnnnnnnnnnnnnnnnnnnnnnnnnnnnnnnnnnnnnnnnnnnnnnnnnnnnnnnnnnnnnnnnnnnnnnnnnnnnnnnnnnnnnnnnnnnnnnnnnnnnnnnnnnnnnnnnnnnnnnnnnnnnnnnnnnnnnnnnnnnnnnnnnnnnnnnnnnnnnnnnnnnnnnnnnnnnnnnnnnnnnnnnnnnnnnnnnnnnnnnnnnnnnnnnnnnnnnnnnnnnnnnnnnnnnnnnnnnnnnnnnnnnnnnnnnnnnnnnnnnnnnnnnnnnnnnnnnnnnnnnnnnnnnnnnnnnnnnnnnnnnnnnnnnnnnnnnnnnnnnnnnnnnnnnnnnnnnnnnnnnnnnnnnnnnnnnnnnnnnnnnnnnnnnnnnnnnnnnnnnnnnnnnnnnnnnnnnnnnnnnnnnnnnnnnnnnnnnnnnnnnnnnnnnnnnnnnnnnnnnnnnnnnnnnnnnnnnnnnnnnnnnnnnnnnnnnnnnnnnnnnnnnnnnnnnnnnnnnnnnnnnnnnnnnnnnnnnnnnnnnnnnnnnnnnnnnnnnnnnnnnnnnnnnnnnnnnnnnnnnnnnnnnnnnnnnnnnnnnnnnnnnnnnnnnnnnnnnnnnnnnnnnnnnnnnnnnnnnnnnnnnnnnnnnnnnnnnnnnnnnnnnnnnnnnnnnnnnnnnnnnnnnnnnnnnnnnnnnnnnnnnnnnnnnnnnnnnnnnnnnnnnnnnnnnnnnnnnnnnnnnnnnnnnnnnnnnnnnnnnnnnnnnnnnnnnnnnnnnnnnnnnnnnnnnnnnnnnnnnnnnnnnnnnnnnnnnnnnnnnnnnnnnnnnnnnnnnnnnnnnnnnnnnnnnnnnnnnnnnnnnnnnnnnnnnnnnnnnnnnnnnnnnnnnnnnnnnnnnnnnnnnnnnnnnnnnnnnnnnnnnnnnnnnnnnnnnnnnnnnnnnnnnnnnnnnnnnnnnnnnnnnnnnnnnnnnnnnnnnnnnnnnnnnnnnnnnnnnnnnnnnnnnnnnnnnnnnnnnnnnnnnnnnnnnnnnnnnnnnnnnnnnnnnnnnnnnnnnnnnnnnnnnnnnnnnnnnnnnnnnnnnnnnnnnnnnnnnnnnnnnnnnnnnnnnnnnnnnnnnnnnnnnnnnnnnnnnnnnnnnnnnnnnnnnnnnnnnnnnnnnnnnnnnnnnnnnnnnnnnnnnnnnnnnnnnnnnnnnnnnnnnnnnnnnnnnnnnnnnnnnnnnnnnnnnnnnnnnnnnnnnnnnnnnnnnnnnnnnnnnnnnnnnnnnnnnnnnnnnnnnnnnnnnnnnnnnnnnnnnnnnnnnnnnnnnnnnnnnnnnnnnnnnnnnnnnnnnnnnnnnnnnnnnnnnnnnnnnnnnnnnnnnnnnnnnnnnnnnnnnnnnnnnnnnnnnnnnnnnnnnnnnnnnnnnnnnnnnnnnnnnnnnnnnnnnnnnnnnnnnnnnnnnnnnnnnnnnnnnnnnnnnnnnnnnnnnnnnnnnnnnnnnnnnnnnnnnnnnnnnnnnnnnnnnnnnnnnnnnnnnnnnnnnnnnnnnnnnnnnnnnnnnnnnnnnnnnnnnnnnnnnnnnnnnnnnnnnnnnnnnnnnnnnnnnnnnnnnnnnnnnnnnnnnnnnnnnnnnnnnnnnnnnnnnnnnnnnnnnnnnnnnnnnnnnnnnnnnnnnnnnnnnnnnnnnnnnnnnnnnnnnnnnnnnnnnnnnnnnnnnnnnnnnnnnnnnnnnnnnnnnnnnnnnnnnnnnnnnnnnnnnnnnnnnnnnnnnnnnnnnnnnnnnnnnnnnnnnnnnnnnnnnnnnnnnnnnnnnnnnnnnnnnnnnnnnnnnnnnnnnnnnnnnnnnnnnnnnnnnnnnnnnnnnnnnnnnnnnnnnnnnnnnnnnnnnnnnnnnnnnnnnnnnnnnnnnnnnnnnnnnnnnnnnnnnnnnnnnnnnnnnnnnnnnnnnnnnnnnnnnnnnnnnnnnnnnnnnnnnnnnnnnnnnnnnnnnnnnnnnnnnnnnnnnnnnnnnnnnnnnnnnnnnnnnnnnnnnnnnnnnnnnnnnnnnnnnnnnnnnnnnnnnnnnnnnnnnnnnnnnnnnnnnnnnnnnnnnnnnnnnnnnnnnnnnnnnnnnnnnnnnnnnnnnnnnnnnnnnnnnnnnnnnnnnnnnnnnnnnnnnnnnnnnnnnnnnnnnnnnnnnnnnnnnnnnnnnnnnnnnnnnnnnnnnnnnnnnnnnnnnnnnnnnnnnnnnnnnnnnnnnnnnnnnnnnnnnnnnnnnnnnnnnnnnnnnnnnnnnnnnnnnnnnnnnnnnnnnnnnnnnnnnnnnnnnnnnnnnnnnnnnnnnnnnnnnnnnnnnnnnnnnnnnnnnnnnnnnnnnnnnnnnnnnnnnnnnnnnnnnnnnnnnnnnnnnnnnnnnnnnnnnnnnnnnnnnnnnnnnnnnnnnnnnnnnnnnnnnnnnnnnnnnnnnnnnnnnnnnnnnnnnnnnnnnnnnnnnnnnnnnnnnnnnnnnnnnnnnnnnnnnnnnnnnnnnnnnnnnnnnnnnnnnnnnnnnnnnnnnnnnnnnnnnnnnnnnnnnnnnnnnnnnnnnnnnnnnnnnnnnnnnnnnnnnnnnnnnnnnnnnnnnnnnnnnnnnnnnnnnnnnnnnnnnnnnnnnnnnnnnnnnnnnnnnnnnnnnnnnnnnnnnnnnnnnnnnnnnnnnnnnnnnnnnnnnnnnnnnnnnnnnnnnnnnnnnnnnnnnnnnnnnnnnnnnnnnnnnnnnnnnnnnnnnnnnnnnnnnnnnnnnnnnnnnnnnnnnnnnnnnnnnnnnnnnnnnnnnnnnnnnnnnnnnnnnnnnnnnnnnnnnnnnnnnnnnnnnnnnnnnnnnnnnnnnnnnnnnnnnnnnnnnnnnnnnnnnnnnnnnnnnnnnnnnnnnnnnnnnnnnnnnnnnnnnnnnnnnnnnnnnnnnnnnnnnnnnnnnnnnnnnnnnnnnnnnnnnnnnnnnnnnnnnnnnnnnnnnnnnnnnnnnnnnnnnnnnnnnnnnnnnnnnnnnnnnnnnnnnnnnnnnnnnnnnnnnnnnnnnnnnnnnnnnnnnnnnnnnnnnnnnnnnnnnnnnnnnnnnnnnnnnnnnnnnnnnnnnnnnnnnnnnnnnnnnnnnnnnnnnnnnnnnnnnnnnnnnnnnnnnnnnnnnnnnnnnnnnnnnnnnnnnnnnnnnnnnnnnnnnnnnnnnnnnnnnnnnnnnnnnnnnnnnnnnnnnnnnnnnnnnnnnnnnnnnnnnnnnnnnnnnnnnnnnnnnnnnnnnnnnnnnnnnnnnnnnnnnnnnnnnnnnnnnnnnnnnnnnnnnnnnnnnnnnnnnnnnnnnnnnnnnnnnnnnnnnnnnnnnnnnnnnnnnnnnnnnnnnnnnnnnnnnnnnnnnnnnnnnnnnnnnnnnnnnnnnnnnnnnnnnnnnnnnnnnnnnnnnnnnnnnnnnnnnnnnnnnnnnnnnnnnnnnnnnnnnnnnnnnnnnnnnnnnnnnnnnnnnnnnnnnnnnnnnnnnnnnnnnnnnnnnnnnnnnnnnnnnnnnnnnnnnnnnnnnnnnnnnnnnnnnnnnnnnnnnnnnnnnnnnnnnnnnnnnnnnnnnnnnnnnnnnnnnnnnnnnnnnnnnnnnnnnnnnnnnnnnnnnnnnnnnnnnnnnnnnnnnnnnnnnnnnnnnnnnnnnnnnnnnnnnnnnnnnnnnnnnnnnnnnnnnnnnnnnnnnnnnnnnnnnnnnnnnnnnnnnnnnnnnnnnnnnnnnnnnnnnnnnnnnnnnnnnnnnnnnnnnnnnnnnnnnnnnnnnnnnnnnnnnnnnnnnnnnnnnnnnnnnnnnnnnnnnnnnnnnnnnnnnnnnnnnnnnnnnnnnnnnnnnnnnnnnnnnnnnnnnnnnnnnnnnnnnnnnnnnnnnnnnnnnnnnnnnnnnnnnnnnnnnnnnnnnnnnnnnnnnnnnnnnnnnnnnnnnnnnnnnnnnnnnnnnnnnnnnnnnnnnnnnnnnnnnnnnnnnnnnnnnnnnnnnnnnnnnnnnnnnnnnnnnnnnnnnnnnnnnnnnnnnnnnnnnnnnnnnnnnnnnnnnnnnnnnnnnnnnnnnnnnnnnnnnnnnnnnnnnnnnnnnnnnnnnnnnnnnnnnnnnnnnnnnnnnnnnnnnnnnnnnnnnnnnnnnnnnnnnnnnnnnnnnnnnnnnnnnnnnnnnnnnnnnnnnnnnnnnnnnnnnnnnnnnnnnnnnnnnnnnnnnnnnnnnnnnnnnnnnnnnnnnnnnnnnnnnnnnnnnnnnnnnnnnnnnnnnnnnnnnnnnnnnnnnnnnnnnnnnnnnnnnnnnnnnnnnnnnnnnnnnnnnnnnnnnnnnnnnnnnnnnnnnnnnnnnnnnnnnnnnnnnnnnnnnnnnnnnnnnnnnnnnnnnnnnnnnnnnnnnnnnnnnnnnnnnnnnnnnnnnnnnnnnnnnnnnnnnnnnnnnnnnnnnnnnnnnnnnnnnnnnnnnnnnnnnnnnnnnnnnnnnnnnnnnnnnnnnnnnnnnnnnnnnnnnnnnnnnnnnnnnnnnnnnnnnnnnnnnnnnnnnnnnnnnnnnnnnnnnnnnnnnnnnnnnnnnnnnnnnnnnnnnnnnnnnnnnnnnnnnnnnnnnnnnnnnnnnnnnnnnnnnnnnnnnnnnnnnnnnnnnnnnnnnnnnnnnnnnnnnnnnnnnnnnnnnnnnnnnnnnnnnnnnnnnnnnnnnnnnnnnnnnnnnnnnnnnnnnnnnnnnnnnnnnnnnnnnnnnnnnnnnnnnnnnnnnnnnnnnnnnnnnnnnnnnnnnnnnnnnnnnnnnnnnnnnnnnnnnnnnnnnnnnnnnnnnnnnnnnnnnnnnnnnnnnnnnnnnnnnnnnnnnnnnnnnnnnnnnnnnnnnnnnnnnnnnnnnnnnnnnnnnnnnnnnnnnnnnnnnnnnnnnnnnnnnnnnnnnnnnnnnnnnnnnnnnnnnnnnnnnnnnnnnnnnnnnnnnnnnnnnnnnnnnnnnnnnnnnnnnnnnnnnnnnnnnnnnnnnnnnnnnnnnnnnnnnnnnnnnnnnnnnnnnnnnnnnnnnnnnnnnnnnnnnnnnnnnnnnnnnnnnnnnnnnnnnnnnnnnnnnnnnnnnnnnnnnnnnnnnnnnnnnnnnnnnnnnnnnnnnnnnnnnnnnnnnnnnnnnnnnnnnnnnnnnnnnnnnnnnnnnnnnnnnnnnnnnnnnnnnnnnnnnnnnnnnnnnnnnnnnnnnnnnnnnnnnnnnnnnnnnnnnnnnnnnnnnnnnnnnnnnnnnnnnnnnnnnnnnnnnnnnnnnnnnnnnnnnnnnnnnnnnnnnnnnnnnnnnnnnnnnnnnnnnnnnnnnnnnnnnnnnnnnnnnnnnnnnnnnnnnnnnnnnnnnnnnnnnnnnnnnnnnnnnnnnnnnnnnnnnnnnnnnnnnnnnnnnnnnnnnnnnnnnnnnnnnnnnnnnnnnnnnnnnnnnnnnnnnnnnnnnnnnnnnnnnnnnnnnnnnnnnnnnnnnnnnnnnnnnnnnnnnnnnnnnnnnnnnnnnnnnnnnnnnnnnnnnnnnnnnnnnnnnnnnnnnnnnnnnnnnnnnnnnnnnnnnnnnnnnnnnnnnnnnnnnnnnnnnnnnnnnnnnnnnnnnnnnnnnnnnnnnnnnnnnnnnnnnnnnnnnnnnnnnnnnnnnnnnnnnnnnnnnnnnnnnnnnnnnnnnnnnnnnnnnnnnnnnnnnnnnnnnnnnnnnnnnnnnnnnnnnnnnnnnnnnnnnnnnnnnnnnnnnnnnnnnnnnnnnnnnnnnnnnnnnnnnnnnnnnnnnnnnnnnnnnnnnnnnnnnnnnnnnnnnnnnnnnnnnnnnnnnnnnnnnnnnnnnnnnnnnnnnnnnnnnnnnnnnnnnnnnnnnnnnnnnnnnnnnnnnnnnnnnnnnnnnnnnnnnnnnnnnnnnnnnnnnnnnnnnnnnnnnnnnnnnnnnnnnnnnnnnnnnnnnnnnnnnnnnnnnnnnnnnnnnnnnnnnnnnnnnnnnnnnnnnnnnnnnnnnnnnnnnnnnnnnnnnnnnnnnnnnnnnnnnnnnnnnnnnnnnnnnnnnnnnnnnnnnnnnnnnnnnnnnnnnnnnnnnnnnnnnnnnnnnnnnnnnnnnnnnnnnnnnnnnnnnnnnnnnnnnnnnnnnnnnnnnnnnnnnnnnnnnnnnnnnnnnnnnnnnnnnnnnnnnnnnnnnnnnnnnnnnnnnnnnnnnnnnnnnnnnnnnnnnnnnnnnnnnnnnnnnnnnnnnnnnnnnnnnnnnnnnnnnnnnnnnnnnnnnnnnnnnnnnnnnnnnnnnnnnnnnnnnnnnnnnnnnnnnnnnnnnnnnnnnnnnnnnnnnnnnnnnnnnnnnnnnnnnnnnnnnnnnnnnnnnnnnnnnnnnnnnnnnnnnnnnnnnnnnnnnnnnnnnnnnnnnnnnnnnnnnnnnnnnnnnnnnnnnnnnnnnnnnnnnnnnnnnnnnnnnnnnnnnnnnnnnnnnnnnnnnnnnnnnnnnnnnnnnnnnnnnnnnnnnnnnnnnnnnnnnnnnnnnnnnnnnnnnnnnnnnnnnnnnnnnnnnnnnnnnnnnnnnnnnnnnnnnnnnnnnnnnnnnnnnnnnnnnnnnnnnnnnnnnnnnnnnnnnnnnnnnnnnnnnnnnnnnnnnnnnnnnnnnnnnnnnnnnnnnnnnnnnnnnnnnnnnnnnnnnnnnnnnnnnnnnnnnnnnnnnnnnnnnnnnnnnnnnnnnnnnnnnnnnnnnnnnnnnnnnnnnnnnnnnnnnnnnnnnnnnnnnnnnnnnnnnnnnnnnnnnnnnnnnnnnnnnnnnnnnnnnnnnnnnnnnnnnnnnnnnnnnnnnnnnnnnnnnnnnnnnnnnnnnnnnnnnnnnnnnnnnnnnnnnnnnnnnnnnnnnnnnnnnnnnnnnnnnnnnnnnnnnnnnnnnnnnnnnnnnnnnnnnnnnnnnnnnnnnnnnnnnnnnnnnnnnnnnnnnnnnnnnnnnnnnnnnnnnnnnnnnnnnnnnnnnnnnnnnnnnnnnnnnnnnnnnnnnnnnnnnnnnnnnnnnnnnnnnnnnnnnnnnnnnnnnnnnnnnnnnnnnnnnnnnnnnnnnnnnnnnnnnnnnnnnnnnnnnnnnnnnnnnnnnnnnnnnnnnnnnnnnnnnnnnnnnnnnnnnnnnnnnnnnnnnnnnnnnnnnnnnnnnnnnnnnnnnnnnnnnnnnnnnnnnnnnnnnnnnnnnnnnnnnnnnnnnnnnnnnnnnnnnnnnnnnnnnnnnnnnnnnnnnnnnnnnnnnnnnnnnnnnnnnnnnnnnnnnnnnnnnnnnnnnnnnnnnnnnnnnnnnnnnnnnnnnnnnnnnnnnnnnnnnnnnnnnnnnnnnnnnnnnnnnnnnnnnnnnnnnnnnnnnnnnnnnnnnnnnnnnnnnnnnnnnnnnnnnnnnnnnnnnnnnnnnnnnnnnnnnnnnnnnnnnnnnnnnnnnnnnnnnnnnnnnnnnnnnnnnnnnnnnnnnnnnnnnnnnnnnnnnnnnnnnnnnnnnnnnnnnnnnnnnnnnnnnnnnnnnnnnnnnnnnnnnnnnnnnnnnnnnnnnnnnnnnnnnnnnnnnnnnnnnnnnnnnnnnnnnnnnnnnnnnnnnnnnnnnnnnnnnnnnnnnnnnnnnnnnnnnnnnnnnnnnnnnnnnnnnnnnnnnnnnnnnnnnnnnnnnnnnnnnnnnnnnnnnnnnnnnnnnnnnnnnnnnnnnnnnnnnnnnnnnnnnnnnnnnnnnnnnnnnnnnnnnnnnnnnnnnnnnnnnnnnnnnnnnnnnnnnnnnnnnnnnnnnnnnnnnnnnnnnnnnnnnnnnnnnnnnnnnnnnnnnnnnnnnnnnnnnnnnnnnnnnnnnnnnnnnnnnnnnnnnnnnnnnnnnnnnnnnnnnnnnnnnnnnnnnnnnnnnnnnnnnnnnnnnnnnnnnnnnnnnnnnnnnnnnnnnnnnnnnnnnnnnnnnnnnnnnnnnnnnnnnnnnnnnnnnnnnnnnnnnnnnnnnnnnnnnnnnnnnnnnnnnnnnnnnnnnnnnnnnnnnnnnnnnnnnnnnnnnnnnnnnnnnnnnnnnnnnnnnnnnnnnnnnnnnnnnnnnnnnnnnnnnnnnnnnnnnnnnnnnnnnnnnnnnnnnnnnnnnnnnnnnnnnnnnnnnnnnnnnnnnnnnnnnnnnnnnnnnnnnnnnnnnnnnnnnnnnnnnnnnnnnnnnnnnnnnnnnnnnnnnnnnnnnnnnnnnnnnnnnnnnnnnnnnnnnnnnnnnnnnnnnnnnnnnnnnnnnnnnnnnnnnnnnnnnnnnnnnnnnnnnnnnnnnnnnnnnnnnnnnnnnnnnnnnnnnnnnnnnnnnnnnnnnnnnnnnnnnnnnnnnnnnnnnnnnnnnnnnnnnnnnnnnnnnnnnnnnnnnnnnnnnnnnnnnnnnnnnnnnnnnnnnnnnnnnnnnnnnnnnnnnnnnnnnnnnnnnnnnnnnnnnnnnnnnnnnnnnnnnnnnnnnnnnnnnnnnnnnnnnnnnnnnnnnnnnnnnnnnnnnnnnnnnnnnnnnnnnnnnnnnnnnnnnnnnnnnnnnnnnnnnnnnnnnnnnnnnnnnnnnnnnnnnnnnnnnnnnnnnnnnnnnnnnnnnnnnnnnnnnnnnnnnnnnnnnnnnnnnnnnnnnnnnnnnnnnnnnnnnnnnnnnnnnnnnnnnnnnnnnnnnnnnnnnnnnnnnnnnnnnnnnnnnnnnnnnnnnnnnnnnnnnnnnnnnnnnnnnnnnnnnnnnnnnnnnnnnnnnnnnnnnnnnnnnnnnnnnnnnnnnnnnnnnnnnnnnnnnnnnnnnnnnnnnnnnnnnnnnnnnnnnnnnnnnnnnnnnnnnnnnnnnnnnnnnnnnnnnnnnnnnnnnnnnnnnnnnnnnnnnnnnnnnnnnnnnnnnnnnnnnnnnnnnnnnnnnnnnnnnnnnnnnnnnnnnnnnnnnnnnnnnnnnnnnnnnnnnnnnnnnnnnnnnnnnnnnnnnnnnnnnnnnnnnnnnnnnnnnnnnnnnnnnnnnnnnnnnnnnnnnnnnnnnnnnnnnnnnnnnnnnnnnnnnnnnnnnnnnnnnnnnnnnnnnnnnnnnnnnnnnnnnnnnnnnnnnnnnnnnnnnnnnnnnnnnnnnnnnnnnnnnnnnnnnnnnnnnnnnnnnnnnnnnnnnnnnnnnnnnnnnnnnnnnnnnnnnnnnnnnnnnnnnnnnnnnnnnnnnnnnnnnnnnnnnnnnnnnnnnnnnnnnnnnnnnnnnnnnnnnnnnnnnnnnnnnnnnnnnnnnnnnnnnnnnnnnnnnnnnnnnnnnnnnnnnnnnnnnnnnnnnnnnnnnnnnnnnnnnnnnnnnnnnnnnnnnnnnnnnnnnnnnnnnnnnnnnnnnnnnnnnnnnnnnnnnnnnnnnnnnnnnnnnnnnnnnnnnnnnnnnnnnnnnnnnnnnnnnnnnnnnnnnnnnnnnnnnnnnnnnnnnnnnnnnnnnnnnnnnnnnnnnnnnnnnnnnnnnnnnnnnnnnnnnnnnnnnnnnnnnnnnnnnnnnnnnnnnnnnnnnnnnnnnnnnnnnnnnnnnnnnnnnnnnnnnnnnnnnnnnnnnnnnnnnnnnnnnnnnnnnnnnnnnnnnnnnnnnnnnnnnnnnnnnnnnnnnnnnnnnnnnnnnnnnnnnnnnnnnnnnnnnnnnnnnnnnnnnnnnnnnnnnnnnnnnnnnnnnnnnnnnnnnnnnnnnnnnnnnnnnnnnnnnnnnnnnnnnnnnnnnnnnnnnnnnnnnnnnnnnnnnnnnnnnnnnnnnnnnnnnnnnnnnnnnnnnnnnnnnnnnnnnnnnnnnnnnnnnnnnnnnnnnnnnnnnnnnnnnnnnnnnnnnnnnnnnnnnnnnnnnnnnnnnnnnnnnnnnnnnnnnnnnnnnnnnnnnnnnnnnnnnnnnnnnnnnnnnnnnnnnnnnnnnnnnnnnnnnnnnnnnnnnnnnnnnnnnnnnnnnnnnnnnnnnnnnnnnnnnnnnnnnnnnnnnnnnnnnnnnnnnnnnnnnnnnnnnnnnnnnnnnnnnnnnnnnnnnnnnnnnnnnnnnnnnnnnnnnnnnnnnnnnnnnnnnnnnnnnnnnnnnnnnnnnnnnnnnnnnnnnnnnnnnnnnnnnnnnnnnnnnnnnnnnnnnnnnnnnnnnnnnnnnnnnnnnnnnnnnnnnnnnnnnnnnnnnnnnnnnnnnnnnnnnnnnnnnnnnnnnnnnnnnnnnnnnnnnnnnnnnnnnnnnnnnnnnnnnnnnnnnnnnnnnnnnnnnnnnnnnnnnnnnnnnnnnnnnnnnnnnnnnnnnnnnnnnnnnnnnnnnnnnnnnnnnnnnnnnnnnnnnnnnnnnnnnnnnnnnnnnnnnnnnnnnnnnnnnnnnnnnnnnnnnnnnnnnnnnnnnnnnnnnnnnnnnnnnnnnnnnnnnnnnnnnnnnnnnnnnnnnnnnnnnnnnnnnnnnnnnnnnnnnnnnnnnnnnnnnnnnnnnnnnnnnnnnnnnnnnnnnnnnnnnnnnnnnnnnnnnnnnnnnnnnnnnnnnnnnnnnnnnnnnnnnnnnnnnnnnnnnnnnnnnnnnnnnnnnnnnnnnnnnnnnnnnnnnnnnnnnnnnnnnnnnnnnnnnnnnnnnnnnnnnnnnnnnnnnnnnnnnnnnnnnnnnnnnnnnnnnnnnnnnnnnnnnnnnnnnnnnnnnnnnnnnnnnnnnnnnnnnnnnnnnnnnnnnnnnnnnnnnnnnnnnnnnnnnnnnnnnnnnnnnnnnnnnnnnnnnnnnnnnnnnnnnnnnnnnnnnnnnnnnnnnnnnnnnnnnnnnnnnnnnnnnnnnnnnnnnnnnnnnnnnnnnnnnnnnnnnnnnnnnnnnnnnnnnnnnnnnnnnnnnnnnnnnnnnnnnnnnnnnnnnnnnnnnnnnnnnnnnnnnnnnnnnnnnnnnnnnnnnnnnnnnnnnnnnnnnnnnnnnnnnnnnnnnnnnnnnnnnnnnnnnnnnnnnnnnnnnnnnnnnnnnnnnnnnnnnnnnnnnnnnnnnnnnnnnnnnnnnnnnnnnnnnnnnnnnnnnnnnnnnnnnnnnnnnnnnnnnnnnnnnnnnnnnnnnnnnnnnnnnnnnnnnnnnnnnnnnnnnnnnnnnnnnnnnnnnnnnnnnnnnnnnnnnnnnnnnnnnnnnnnnnnnnnnnnnnnnnnnnnnnnnnnnnnnnnnnnnnnnnnnnnnnnnnnnnnnnnnnnnnnnnnnnnnnnnnnnnnnnnnnnnnnnnnnnnnnnnnnnnnnnnnnnnnnnnnnnnnnnnnnnnnnnnnnnnnnnnnnnnnnnnnnnnnnnnnnnnnnnnnnnnnnnnnnnnnnnnnnnnnnnnnnnnnnnnnnnnnnnnnnnnnnnnnnnnnnnnnnnnnnnnnnnnnnnnnnnnnnnnnnnnnnnnnnnnnnnnnnnnnnnnnnnnnnnnnnnnnnnnnnnnnnnnnnnnnnnnnnnnnnnnnnnnnnnnnnnnnnnnnnnnnnnnnnnnnnnnnnnnnnnnnnnnnnnnnnnnnnnnnnnnnnnnnnnnnnnnnnnnnnnnnnnnnnnnnnnnnnnnnnnnnnnnnnnnnnnnnnnnnnnnnnnnnnnnnnnnnnnnnnnnnnnnnnnnnnnnnnnnnnnnnnnnnnnnnnnnnnnnnnnnnnnnnnnnnnnnnnnnnnnnnnnnnnnnnnnnnnnnnnnnnnnnnnnnnnnnnnnnnnnnnnnnnnnnnnnnnnnnnnnnnnnnnnnnnnnnnnnnnnnnnnnnnnnnnnnnnnnnnnnnnnnnnnnnnnnnnnnnnnnnnnnnnnnnnnnnnnnnnnnnnnnnnnnnnnnnnnnnnnnnnnnnnnnnnnnnnnnnnnnnnnnnnnnnnnnnnnnnnnnnnnnnnnnnnnnnnnnnnnnnnnnnnnnnnnnnnnnnnnnnnnnnnnnnnnnnnnnnnnnnnnnnnnnnnnnnnnnnnnnnnnnnnnnnnnnnnnnnnnnnnnnnnnnnnnnnnnnnnnnnnnnnnnnnnnnnnnnnnnnnnnnnnnnnnnnnnnnnnnnnnnnnnnnnnnnnnnnnnnnnnnnnnnnnnnnnnnnnnnnnnnnnnnnnnnnnnnnnnnnnnnnnnnnnnnnnnnnnnnnnnnnnnnnnnnnnnnnnnnnnnnnnnnnnnnnnnnnnnnnnnnnnnnnnnnnnnnnnnnnnnnnnnnnnnnnnnnnnnnnnnnnnnnnnnnnnnnnnnnnnnnnnnnnnnnnnnnnnnnnnnnnnnnnnnnnnnnnnnnnnnnnnnnnnnnnnnnnnnnnnnnnnnnnnnnnnnnnnnnnnnnnnnnnnnnnnnnnnnnnnnnnnnnnnnnnnnnnnnnnnnnnnnnnnnnnnnnnnnnnnnnnnnnnnnnnnnnnnnnnnnnnnnnnnnnnnnnnnnnnnnnnnnnnnnnnnnnnnnnnnnnnnnnnnnnnnnnnnnnnnnnnnnnnnnnnnnnnnnnnnnnnnnnnnnnnnnnnnnnnnnnnnnnnnnnnnnnnnnnnnnnnnnnnnnnnnnnnnnnnnnnnnnnnnnnnnnnnnnnnnnnnnnnnnnnnnnnnnnnnnnnnnnnnnnnnnnnnnnnnnnnnnnnnnnnnnnnnnnnnnnnnnnnnnnnnnnnnnnnnnnnnnnnnnnnnnnnnnnnnnnnnnnnnnnnnnnnnnnnnnnnnnnnnnnnnnnnnnnnnnnnnnnnnnnnnnnnnnnnnnnnnnnnnnnnnnnnnnnnnnnnnnnnnnnnnnnnnnnnnnnnnnnnnnnnnnnnnnnnnnnnnnnnnnnnnnnnnnnnnnnnnnnnnnnnnnnnnnnnnnnnnnnnnnnnnnnnnnnnnnnnnnnnnnnnnnnnnnnnnnnnnnnnnnnnnnnnnnnnnnnnnnnnnnnnnnnnnnnnnnnnnnnnnnnnnnnnnnnnnnnnnnnnnnnnnnnnnnnnnnnnnnnnnnnnnnnnnnnnnnnnnnnnnnnnnnnnnnnnnnnnnnnnnnnnnnnnnnnnnnnnnnnnnnnnnnnnnnnnnnnnnnnnnnnnnnnnnnnnnnnnnnnnnnnnnnnnnnnnnnnnnnnnnnnnnnnnnnnnnnnnnnnnnnnnnnnnnnnnnnnnnnnnnnnnnnnnnnnnnnnnnnnnnnnnnnnnnnnnnnnnnnnnnnnnnnnnnnnnnnnnnnnnnnnnnnnnnnnnnnnnnnnnnnnnnnnnnnnnnnnnnnnnnnnnnnnnnnnnnnnnnnnnnnnnnnnnnnnnnnnnnnnnnnnnnnnnnnnnnnnnnnnnnnnnnnnnnnnnnnnnnnnnnnnnnnnnnnnnnnnnnnnnnnnnnnnnnnnnnnnnnnnnnnnnnnnnnnnnnnnnnnnnnnnnnnnnnnnnnnnnnnnnnnnnnnnnnnnnnnnnnnnnnnnnnnnnnnnnnnnnnnnnnnnnnnnnnnnnnnnnnnnnnnnnnnnnnnnnnnnnnnnnnnnnnnnnnnnnnnnnnnnnnnnnnnnnnnnnnnnnnnnnnnnnnnnnnnnnnnnnnnnnnnnnnnnnnnnnnnnnnnnnnnnnnnnnnnnnnnnnnnnnnnnnnnnnnnnnnnnnnnnnnnnnnnnnnnnnnnnnnnnnnnnnnnnnnnnnnnnnnnnnnnnnnnnnnnnnnnnnnnnnnnnnnnnnnnnnnnnnnnnnnnnnnnnnnnnnnnnnnnnnnnnnnnnnnnnnnnnnnnnnnnnnnnnnnnnnnnnnnnnnnnnnnnnnnnnnnnnnnnnnnnnnnnnnnnnnnnnnnnnnnnnnnnnnnnnnnnnnnnnnnnnnnnnnnnnnnnnnnnnnnnnnnnnnnnnnnnnnnnnnnnnnnnnnnnnnnnnnnnnnnnnnnnnnnnnnnnnnnnnnnnnnnnnnnnnnnnnnnnnnnnnnnnnnnnnnnnnnnnnnnnnnnnnnnnnnnnnnnnnnnnnnnnnnnnnnnnnnnnnnnnnnnnnnnnnnnnnnnnnnnnnnnnnnnnnnnnnnnnnnnnnnnnnnnnnnnnnnnnnnnnnnnnnnnnnnnnnnnnnnnnnnnnnnnnnnnnnnnnnnnnnnnnnnnnnnnnnnnnnnnnnnnnnnnnnnnnnnnnnnnnnnnnnnnnnnnnnnnnnnnnnnnnnnnnnnnnnnnnnnnnnnnnnnnnnnnnnnnnnnnnnnnnnnnnnnnnnnnnnnnnnnnnnnnnnnnnnnnnnnnnnnnnnnnnnnnnnnnnnnnnnnnnnnnnnnnnnnnnnnnnnnnnnnnnnnnnnnnnnnnnnnnnnnnnnnnnnnnnnnnnnnnnnnnnnnnnnnnnnnnnnnnnnnnnnnnnnnnnnnnnnnnnnnnnnnnnnnnnnnnnnnnnnnnnnnnnnnnnnnnnnnnnnnnnnnnnnnnnnnnnnnnnnnnnnnnnnnnnnnnnnnnnnnnnnnnnnnnnnnnnnnnnnnnnnnnnnnnnnnnnnnnnnnnnnnnnnnnnnnnnnnnnnnnnnnnnnnnnnnnnnnnnnnnnnnnnnnnnnnnnnnnnnnnnnnnnnnnnnnnnnnnnnnnnnnnnnnnnnnnnnnnnnnnnnnnnnnnnnnnnnnnnnnnnnnnnnnnnnnnnnnnnnnnnnnnnnnnnnnnnnnnnnnnnnnnnnnnnnnnnnnnnnnnnnnnnnnnnnnnnnnnnnnnnnnnnnnnnnnnnnnnnnnnnnnnnnnnnnnnnnnnnnnnnnnnnnnnnnnnnnnnnnnnnnnnnnnnnnnnnnnnnnnnnnnnnnnnnnnnnnnnnnnnnnnnnnnnnnnnnnnnnnnnnnnnnnnnnnnnnnnnnnnnnnnnnnnnnnnnnnnnnnnnnnnnnnnnnnnnnnnnnnnnnnnnnnnnnnnnnnnnnnnnnnnnnnnnnnnnnnnnnnnnnnnnnnnnnnnnnnnnnnnnnnnnnnnnnnnnnnnnnnnnnnnnnnnnnnnnnnnnnnnnnnnnnnnnnnnnnnnnnnnnnnnnnnnnnnnnnnnnnnnnnnnnnnnnnnnnnnnnnnnnnnnnnnnnnnnnnnnnnnnnnnnnnnnnnnnnnnnnnnnnnnnnnnnnnnnnnnnnnnnnnnnnnnnnnnnnnnnnnnnnnnnnnnnnnnnnnnnnnnnnnnnnnnnnnnnnnnnnnnnnnnnnnnnnnnnnnnnnnnnnnnnnnnnnnnnnnnnnnnnnnnnnnnnnnnnnnnnnnnnnnnnnnnnnnnnnnnnnnnnnnnnnnnnnnnnnnnnnnnnnnnnnnnnnnnnnnnnnnnnnnnnnnnnnnnnnnnnnnnnnnnnnnnnnnnnnnnnnnnnnnnnnnnnnnnnnnnnnnnnnnnnnnnnnnnnnnnnnnnnnnnnnnnnnnnnnnnnnnnnnnnnnnnnnnnnnnnnnnnnnnnnnnnnnnnnnnnnnnnnnnnnnnnnnnnnnnnnnnnnnnnnnnnnnnnnnnnnnnnnnnnnnnnnnnnnnnnnnnnnnnnnnnnnnnnnnnnnnnnnnnnnnnnnnnnnnnnnnnnnnnnnnnnnnnnnnnnnnnnnnnnnnnnnnnnnnnnnnnnnnnnnnnnnnnnnnnnnnnnnnnnnnnnnnnnnnnnnnnnnnnnnnnnnnnnnnnnnnnnnnnnnnnnnnnnnnnnnnnnnnnnnnnnnnnnnnnnnnnnnnnnnnnnnnnnnnnnnnnnnnnnnnnnnnnnnnnnnnnnnnnnnnnnnnnnnnnnnnnnnnnnnnnnnnnnnnnnnnnnnnnnnnnnnnnnnnnnnnnnnnnnnnnnnnnnnnnnnnnnnnnnnnnnnnnnnnnnnnnnnnnnnnnnnnnnnnnnnnnnnnnnnnnnnnnnnnnnnnnnnnnnnnnnnnnnnnnnnnnnnnnnnnnnnnnnnnnnnnnnnnnnnnnnnnnnnnnnnnnnnnnnnnnnnnnnnnnnnnnnnnnnnnnnnnnnnnnnnnnnnnnnnnnnnnnnnnnnnnnnnnnnnnnnnnnnnnnnnnnnnnnnnnnnnnnnnnnnnnnnnnnnnnnnnnnnnnnnnnnnnnnnnnnnnnnnnnnnnnnnnnnnnnnnnnnnnnnnnnnnnnnnnnnnnnnnnnnnnnnnnnnnnnnnnnnnnnnnnnnnnnnnnnnnnnnnnnnnnnnnnnnnnnnnnnnnnnnnnnnnnnnnnnnnnnnnnnnnnnnnnnnnnnnnnnnnnnnnnnnnnnnnnnnnnnnnnnnnnnnnnnnnnnnnnnnnnnnnnnnnnnnnnnnnnnnnnnnnnnnnnnnnnnnnnnnnnnnnnnnnnnnnnnnnnnnnnnnnnnnnnnnnnnnnnnnnnnnnnnnnnnnnnnnnnnnnnnnnnnnnnnnnnnnnnnnnnnnnnnnnnnnnnnnnnnnnnnnnnnnnnnnnnnnnnnnnnnnnnnnnnnnnnnnnnnnnnnnnnnnnnnnnnnnnnnnnnnnnnnnnnnnnnnnnnnnnnnnnnnnnnnnnnnnnnnnnnnnnnnnnnnnnnnnnnnnnnnnnnnnnnnnnnnnnnnnnnnnnnnnnnnnnnnnnnnnnnnnnnnnnnnnnnnnnnnnnnnnnnnnnnnnnnnnnnnnnnnnnnnnnnnnnnnnnnnnnnnnnnnnnnnnnnnnnnnnnnnnnnnnnnnnnnnnnnnnnnnnnnnnnnnnnnnnnnnnnnnnnnnnnnnnnnnnnnnnnnnnnnnnnnnnnnnnnnnnnnnnnnnnnnnnnnnnnnnnnnnnnnnnnnnnnnnnnnnnnnnnnnnnnnnnnnnnnnnnnnnnnnnnnnnnnnnnnnnnnnnnnnnnnnnnnnnnnnnnnnnnnnnnnnnnnnnnnnnnnnnnnnnnnnnnnnnnnnnnnnnnnnnnnnnnnnnnnnnnnnnnnnnnnnnnnnnnnnnnnnnnnnnnnnnnnnnnnnnnnnnnnnnnnnnnnnnnnnnnnnnnnnnnnnnnnnnnnnnnnnnnnnnnnnnnnnnnnnnnnnnnnnnnnnnnnnnnnnnnnnnnnnnnnnnnnnnnnnnnnnnnnnnnnnnnnnnnnnnnnnnnnnnnnnnnnnnnnnnnnnnnnnnnnnnnnnnnnnnnnnnnnnnnnnnnnnnnnnnnnnnnnnnnnnnnnnnnnnnnnnnnnnnnnnnnnnnnnnnnnnnnnnnnnnnnnnnnnnnnnnnnnnnnnnnnnnnnnnnnnnnnnnnnnnnnnnnnnnnnnnnnnnnnnnnnnnnnnnnnnnnnnnnnnnnnnnnnnnnnnnnnnnnnnnnnnnnnnnnnnnnnnnnnnnnnnnnnnnnnnnnnnnnnnnnnnnnnnnnnnnnnnnnnnnnnnnnnnnnnnnnnnnnnnnnnnnnnnnnnnnnnnnnnnnnnnnnnnnnnnnnnnnnnnnnnnnnnnnnnnnnnnnnnnnnnnnnnnnnnnnnnnnnnnnnnnnnnnnnnnnnnnnnnnnnnnnnnnnnnnnnnnnnnnnnnnnnnnnnnnnnnnnnnnnnnnnnnnnnnnnnnnnnnnnnnnnnnnnnnnnnnnnnnnnnnnnnnnnnnnnnnnnnnnnnnnnnnnnnnnnnnnnnnnnnnnnnnnnnnnnnnnnnnnnnnnnnnnnnnnnnnnnnnnnnnnnnnnnnnnnnnnnnnnnnnnnnnnnnnnnnnnnnnnnnnnnnnnnnnnnnnnnnnnnnnnnnnnnnnnnnnnnnnnnnnnnnnnnnnnnnnnnnnnnnnnnnnnnnnnnnnnnnnnnnnnnnnnnnnnnnnnnnnnnnnnnnnnnnnnnnnnnnnnnnnnnnnnnnnnnnnnnnnnnnnnnnnnnnnnnnnnnnnnnnnnnnnnnnnnnnnnnnnnnnnnnnnnnnnnnnnnnnnnnnnnnnnnnnnnnnnnnnnnnnnnnnnnnnnnnnnnnnnnnnnnnnnnnnnnnnnnnnnnnnnnnnnnnnnnnnnnnnnnnnnnnnnnnnnnnnnnnnnnnnnnnnnnnnnnnnnnnnnnnnnnnnnnnnnnnnnnnnnnnnnnnnnnnnnnnnnnnnnnnnnnnnnnnnnnnnnnnnnnnnnnnnnnnnnnnnnnnnnnnnnnnnnnnnnnnnnnnnnnnnnnnnnnnnnnnnnnnnnnnnnnnnnnnnnnnnnnnnnnnnnnnnnnnnnnnnnnnnnnnnnnnnnnnnnnnnnnnnnnnnnnnnnnnnnnnnnnnnnnnnnnnnnnnnnnnnnnnnnnnnnnnnnnnnnnnnnnnnnnnnnnnnnnnnnnnnnnnnnnnnnnnnnnnnnnnnnnnnnnnnnnnnnnnnnnnnnnnnnnnnnnnnnnnnnnnnnnnnnnnnnnnnnnnnnnnnnnnnnnnnnnnnnnnnnnnnnnnnnnnnnnnnnnnnnnnnnnnnnnnnnnnnnnnnnnnnnnnnnnnnnnnnnnnnnnnnnnnnnnnnnnnnnnnnnnnnnnnnnnnnnnnnnnnnnnnnnnnnnnnnnnnnnnnnnnnnnnnnnnnnnnnnnnnnnnnnnnnnnnnnnnnnnnnnnnnnnnnnnnnnnnnnnnnnnnnnnnnnnnnnnnnnnnnnnnnnnnnnnnnnnnnnnnnnnnnnnnnnnnnnnnnnnnnnnnnnnnnnnnnnnnnnnnnnnnnnnnnnnnnnnnnnnnnnnnnnnnnnnnnnnnnnnnnnnnnnnnnnnnnnnnnnnnnnnnnnnnnnnnnnnnnnnnnnnnnnnnnnnnnnnnnnnnnnnnnnnnnnnnnnnnnnnnnnnnnnnnnnnnnnnnnnnnnnnnnnnnnnnnnnnnnnnnnnnnnnnnnnnnnnnnnnnnnnnnnnnnnnnnnnnnnnnnnnnnnnnnnnnnnnnnnnnnnnnnnnnnnnnnnnnnnnnnnnnnnnnnnnnnnnnnnnnnnnnnnnnnnnnnnnnnnnnnnnnnnnnnnnnnnnnnnnnnnnnnnnnnnnnnnnnnnnnnnnnnnnnnnnnnnnnnnnnnnnnnnnnnnnnnnnnnnnnnnnnnnnnnnnnnnnnnnnnnnnnnnnnnnnnnnnnnnnnnnnnnnnnnnnnnnnnnnnnnnnnnnnnnnnnnnnnnnnnnnnnnnnnnnnnnnnnnnnnnnnnnnnnnnnnnnnnnnnnnnnnnnnnnnnnnnnnnnnnnnnnnnnnnnnnnnnnnnnnnnnnnnnnnnnnnnnnnnnnnnnnnnnnnnnnnnnnnnnnnnnnnnnnnnnnnnnnnnnnnnnnnnnnnnnnnnnnnnnnnnnnnnnnnnnnnnnnnnnnnnnnnnnnnnnnnnnnnnnnnnnnnnnnnnnnnnnnnnnnnnnnnnnnnnnnnnnnnnnnnnnnnnnnnnnnnnnnnnnnnnnnnnnnnnnnnnnnnnnnnnnnnnnnnnnnnnnnnnnnnnnnnnnnnnnnnnnnnnnnnnnnnnnnnnnnnnnnnnnnnnnnnnnnnnnnnnnnnnnnnnnnnnnnnnnnnnnnnnnnnnnnnnnnnnnnnnnnnnnnnnnnnnnnnnnnnnnnnnnnnnnnnnnnnnnnnnnnnnnnnnnnnnnnnnnnnnnnnnnnnnnnnnnnnnnnnnnnnnnnnnnnnnnnnnnnnnnnnnnnnnnnnnnnnnnnnnnnnnnnnnnnnnnnnnnnnnnnnnnnnnnnnnnnnnnnnnnnnnnnnnnnnnnnnnnnnnnnnnnnnnnnnnnnnnnnnnnnnnnnnnnnnnnnnnnnnnnnnnnnnnnnnnnnnnnnnnnnnnnnnnnnnnnnnnnnnnnnnnnnnnnnnnnnnnnnnnnnnnnnnnnnnnnnnnnnnnnnnnnnnnnnnnnnnnnnnnnnnnnnnnnnnnnnnnnnnnnnnnnnnnnnnnnnnnnnnnnnnnnnnnnnnnnnnnnnnnnnnnnnnnnnnnnnnnnnnnnnnnnnnnnnnnnnnnnnnnnnnnnnnnnnnnnnnnnnnnnnnnnnnnnnnnnnnnnnnnnnnnnnnnnnnnnnnnnnnnnnnnnnnnnnnnnnnnnnnnnnnnnnnnnnnnnnnnnnnnnnnnnnnnnnnnnnnnnnnnnnnnnnnnnnnnnnnnnnnnnnnnnnnnnnnnnnnnnnnnnnnnnnnnnnnnnnnnnnnnnnnnnnnnnnnnnnnnnnnnnnnnnnnnnnnnnnnnnnnnnnnnnnnnnnnnnnnnnnnnnnnnnnnnnnnnnnnnnnnnnnnnnnnnnnnnnnnnnnnnnnnnnnnnnnnnnnnnnnnnnnnnnnnnnnnnnnnnnnnnnnnnnnnnnnnnnnnnnnnnnnnnnnnnnnnnnnnnnnnnnnnnnnnnnnnnnnnnnnnnnnnnnnnnnnnnnnnnnnnnnnnnnnnnnnnnnnnnnnnnnnnnnnnnnnnnnnnnnnnnnnnnnnnnnnnnnnnnnnnnnnnnnnnnnnnnnnnnnnnnnnnnnnnnnnnnnnnnnnnnnnnnnnnnnnnnnnnnnnnnnnnnnnnnnnnnnnnnnnnnnnnnnnnnnnnnnnnnnnnnnnnnnnnnnnnnnnnnnnnnnnnnnnnnnnnnnnnnnnnnnnnnnnnnnnnnnnnnnnnnnnnnnnnnnnnnnnnnnnnnnnnnnnnnnnnnnnnnnnnnnnnnnnnnnnnnnnnnnnnnnnnnnnnnnnnnnnnnnnnnnnnnnnnnnnnnnnnnnnnnnnnnnnnnnnnnnnnnnnnnnnnnnnnnnnnnnnnnnnnnnnnnnnnnnnnnnnnnnnnnnnnnnnnnnnnnnnnnnnnnnnnnnnnnnnnnnnnnnnnnnnnnnnnnnnnnnnnnnnnnnnnnnnnnnnnnnnnnnnnnnnnnnnnnnnnnnnnnnnnnnnnnnnnnnnnnnnnnnnnnnnnnnnnnnnnnnnnnnnnnnnnnnnnnnnnnnnnnnnnnnnnnnnnnnnnnnnnnnnnnnnnnnnnnnnnnnnnnnnnnnnnnnnnnnnnnnnnnnnnnnnnnnnnnnnnnnnnnnnnnnnnnnnnnnnnnnnnnnnnnnnnnnnnnnnnnnnnnnnnnnnnnnnnnnnnnnnnnnnnnnnnnnnnnnnnnnnnnnnnnnnnnnnnnnnnnnnnnnnnnnnnnnnnnnnnnnnnnnnnnnnnnnnnnnnnnnnnnnnnnnnnnnnnnnnnnnnnnnnnnnnnnnnnnnnnnnnnnnnnnnnnnnnnnnnnnnnnnnnnnnnnnnnnnnnnnnnnnnnnnnnnnnnnnnnnnnnnnnnnnnnnnnnnnnnnnnnnnnnnnnnnnnnnnnnnnnnnnnnnnnnnnnnnnnnnnnnnnnnnnnnnnnnnnnnnnnnnnnnnnnnnnnnnnnnnnnnnnnnnnnnnnnnnnnnnnnnnnnnnnnnnnnnnnnnnnnnnnnnnnnnnnnnnnnnnnnnnnnnnnnnnnnnnnnnnnnnnnnnnnnnnnnnnnnnnnnnnnnnnnnnnnnnnnnnnnnnnnnnnnnnnnnnnnnnnnnnnnnnnnnnnnnnnnnnnnnnnnnnnnnnnnnnnnnnnnnnnnnnnnnnnnnnnnnnnnnnnnnnnnnnnnnnnnnnnnnnnnnnnnnnnnnnnnnnnnnnnnnnnnnnnnnnnnnnnnnnnnnnnnnnnnnnnnnnnnnnnnnnnnnnnnnnnnnnnnnnnnnnnnnnnnnnnnnnnnnnnnnnnnnnnnnnnnnnnnnnnnnnnnnnnnnnnnnnnnnnnnnnnnnnnnnnnnnnnnnnnnnnnnnnnnnnnnnnnnnnnnnnnnnnnnnnnnnnnnnnnnnnnnnnnnnnnnnnnnnnnnnnnnnnnnnnnnnnnnnnnnnnnnnnnnnnnnnnnnnnnnnnnnnnnnnnnnnnnnnnnnnnnnnnnnnnnnnnnnnnnnnnnnnnnnnnnnnnnnnnnnnnnnnnnnnnnnnnnnnnnnnnnnnnnnnnnnnnnnnnnnnnnnnnnnnnnnnnnnnnnnnnnnnnnnnnnnnnnnnnnnnnnnnnnnnnnnnnnnnnnnnnnnnnnnnnnnnnnnnnnnnnnnnnnnnnnnnnnnnnnnnnnnnnnnnnnnnnnnnnnnnnnnnnnnnnnnnnnnnnnnnnnnnnnnnnnnnnnnnnnnnnnnnnnnnnnnnnnnnnnnnnnnnnnnnnnnnnnnnnnnnnnnnnnnnnnnnnnnnnnnnnnnnnnnnnnnnnnnnnnnnnnnnnnnnnnnnnnnnnnnnnnnnnnnnnnnnnnnnnnnnnnnnnnnnnnnnnnnnnnnnnnnnnnnnnnnnnnnnnnnnnnnnnnnnnnnnnnnnnnnnnnnnnnnnnnnnnnnnnnnnnnnnnnnnnnnnnnnnnnnnnnnnnnnnnnnnnnnnnnnnnnnnnnnnnnnnnnnnnnnnnnnnnnnnnnnnnnnnnnnnnnnnnnnnnnnnnnnnnnnnnnnnnnnnnnnnnnnnnnnnnnnnnnnnnnnnnnnnnnnnnnnnnnnnnnnnnnnnnnnnnnnnnnnnnnnnnnnnnnnnnnnnnnnnnnnnnnnnnnnnnnnnnnnnnnnnnnnnnnnnnnnnnnnnnnnnnnnnnnnnnnnnnnnnnnnnnnnnnnnnnnnnnnnnnnnnnnnnnnnnnnnnnnnnnnnnnnnnnnnnnnnnnnnnnnnnnnnnnnnnnnnnnnnnnnnnnnnnnnnnnnnnnnnnnnnnnnnnnnnnnnnnnnnnnnnnnnnnnnnnnnnnnnnnnnnnnnnnnnnnnnnnnnnnnnnnnnnnnnnnnnnnnnnnnnnnnnnnnnnnnnnnnnnnnnnnnnnnnnnnnnnnnnnnnnnnnnnnnnnnnnnnnnnnnnnnnnnnnnnnnnnnnnnnnnnnnnnnnnnnnnnnnnnnnnnnnnnnnnnnnnnnnnnnnnnnnnnnnnnnnnnnnnnnnnnnnnnnnnnnnnnnnnnnnnnnnnnnnnnnnnnnnnnnnnnnnnnnnnnnnnnnnnnnnnnnnnnnnnnnnnnnnnnnnnnnnnnnnnnnnnnnnnnnnnnnnnnnnnnnnnnnnnnnnnnnnnnnnnnnnnnnnnnnnnnnnnnnnnnnnnnnnnnnnnnnnnnnnnnnnnnnnnnnnnnnnnnnnnnnnnnnnnnnnnnnnnnnnnnnnnnnnnnnnnnnnnnnnnnnnnnnnnnnnnnnnnnnnnnnnnnnnnnnnnnnnnnnnnnnnnnnnnnnnnnnnnnnnnnnnnnnnnnnnnnnnnnnnnnnnnnnnnnnnnnnnnnnnnnnnnnnnnnnnnnnnnnnnnnnnnnnnnnnnnnnnnnnnnnnnnnnnnnnnnnnnnnnnnnnnnnnnnnnnnnnnnnnnnnnnnnnnnnnnnnnnnnnnnnnnnnnnnnnnnnnnnnnnnnnnnnnnnnnnnnnnnnnnnnnnnnnnnnnnnnnnnnnnnnnnnnnnnnnnnnnnnnnnnnnnnnnnnnnnnnnnnnnnnnnnnnnnnnnnnnnnnnnnnnnnnnnnnnnnnnnnnnnnnnnnnnnnnnnnnnnnnnnnnnnnnnnnnnnnnnnnnnnnnnnnnnnnnnnnnnnnnnnnnnnnnnnnnnnnnnnnnnnnnnnnnnnnnnnnnnnnnnnnnnnnnnnnnnnnnnnnnnnnnnnnnnnnnnnnnnnnnnnnnnnnnnnnnnnnnnnnnnnnnnnnnnnnnnnnnnnnnnnnnnnnnnnnnnnnnnnnnnnnnnnnnnnnnnnnnnnnnnnnnnnnnnnnnnnnnnnnnnnnnnnnnnnnnnnnnnnnnnnnnnnnnnnnnnnnnnnnnnnnnnnnnnnnnnnnnnnnnnnnnnnnnnnnnnnnnnnnnnnnnnnnnnnnnnnnnnnnnnnnnnnnnnnnnnnnnnnnnnnnnnnnnnnnnnnnnnnnnnnnnnnnnnnnnnnnnnnnnnnnnnnnnnnnnnnnnnnnnnnnnnnnnnnnnnnnnnnnnnnnnnnnnnnnnnnnnnnnnnnnnnnnnnnnnnnnnnnnnnnnnnnnnnnnnnnnnnnnnnnnnnnnnnnnnnnnnnnnnnnnnnnnnnnnnnnnnnnnnnnnnnnnnnnnnnnnnnnnnnnnnnnnnnnnnnnnnnnnnnnnnnnnnnnnnnnnnnnnnnnnnnnnnnnnnnnnnnnnnnnnnnnnnnnnnnnnnnnnnnnnnnnnnnnnnnnnnnnnnnnnnnnnnnnnnnnnnnnnnnnnnnnnnnnnnnnnnnnnnnnnnnnnnnnnnnnnnnnnnnnnnnnnnnnnnnnnnnnnnnnnnnnnnnnnnnnnnnnnnnnnnnnnnnnnnnnnnnnnnnnnnnnnnnnnnnnnnnnnnnnnnnnnnnnnnnnnnnnnnnnnnnnnnnnnnnnnnnnnnnnnnnnnnnnnnnnnnnnnnnnnnnnnnnnnnnnnnnnnnnnnnnnnnnnnnnnnnnnnnnnnnnnnnnnnnnnnnnnnnnnnnnnnnnnnnnnnnnnnnnnnnnnnnnnnnnnnnnnnnnnnnnnnnnnnnnnnnnnnnnnnnnnnnnnnnnnnnnnnnnnnnnnnnnnnnnnnnnnnnnnnnnnnnnnnnnnnnnnnnnnnnnnnnnnnnnnnnnnnnnnnnnnnnnnnnnnnnnnnnnnnnnnnnnnnnnnnnnnnnnnnnnnnnnnnnnnnnnnnnnnnnnnnnnnnnnnnnnnnnnnnnnnnnnnnnnnnnnnnnnnnnnnnnnnnnnnnnnnnnnnnnnnnnnnnnnnnnnnnnnnnnnnnnnnnnnnnnnnnnnnnnnnnnnnnnnnnnnnnnnnnnnnnnnnnnnnnnnnnnnnnnnnnnnnnnnnnnnnnnnnnnnnnnnnnnnnnnnnnnnnnnnnnnnnnnnnnnnnnnnnnnnnnnnnnnnnnnnnnnnnnnnnnnnnnnnnnnnnnnnnnnnnnnnnnnnnnnnnnnnnnnnnnnnnnnnnnnnnnnnnnnnnnnnnnnnnnnnnnnnnnnnnnnnnnnnnnnnnnnnnnnnnnnnnnnnnnnnnnnnnnnnnnnnnnnnnnnnnnnnnnnnnnnnnnnnnnnnnnnnnnnnnnnnnnnnnnnnnnnnnnnnnnnnnnnnnnnnnnnnnnnnnnnnnnnnnnnnnnnnnnnnnnnnnnnnnnnnnnnnnnnnnnnnnnnnnnnnnnnnnnnnnnnnnnnnnnnnnnnnnnnnnnnnnnnnnnnnnnnnnnnnnnnnnnnnnnnnnnnnnnnnnnnnnnnnnnnnnnnnnnnnnnnnnnnnnnnnnnnnnnnnnnnnnnnnnnnnnnnnnnnnnnnnnnnnnnnnnnnnnnnnnnnnnnnnnnnnnnnnnnnnnnnnnnnnnnnnnnnnnnnnnnnnnnnnnnnnnnnnnnnnnnnnnnnnnnnnnnnnnnnnnnnnnnnnnnnnnnnnnnnnnnnnnnnnnnnnnnnnnnnnnnnnnnnnnnnnnnnnnnnnnnnnnnnnnnnnnnnnnnnnnnnnnnnnnnnnnnnnnnnnnnnnnnnnnnnnnnnnnnnnnnnnnnnnnnnnnnnnnnnnnnnnnnnnnnnnnnnnnnnnnnnnnnnnnnnnnnnnnnnnnnnnnnnnnnnnnnnnnnnnnnnnnnnnnnnnnnnnnnnnnnnnnnnnnnnnnnnnnnnnnnnnnnnnnnnnnnnnnnnnnnnnnnnnnnnnnnnnnnnnnnnnnnnnnnnnnnnnnnnnnnnnnnnnnnnnnnnnnnnnnnnnnnnnnnnnnnnnnnnnnnnnnnnnnnnnnnnnnnnnnnnnnnnnnnnnnnnnnnnnnnnnnnnnnnnnnnnnnnnnnnnnnnnnnnnnnnnnnnnnnnnnnnnnnnnnnnnnnnnnnnnnnnnnnnnnnnnnnnnnnnnnnnnnnnnnnnnnnnnnnnnnnnnnnnnnnnnnnnnnnnnnnnnnnnnnnnnnnnnnnnnnnnnnnnnnnnnnnnnnnnnnnnnnnnnnnnnnnnnnnnnnnnnnnnnnnnnnnnnnnnnnnnnnnnnnnnnnnnnnnnnnnnnnnnnnnnnnnnnnnnnnnnnnnnnnnnnnnnnnnnnnnnnnnnnnnnnnnnnnnnnnnnnnnnnnnnnnnnnnnnnnnnnnnnnnnnnnnnnnnnnnnnnnnnnnnnnnnnnnnnnnnnnnnnnnnnnnnnnnnnnnnnnnnnnnnnnnnnnnnnnnnnnnnnnnnnnnnnnnnnnnnnnnnnnnnnnnnnnnnnnnnnnnnnnnnnnnnnnnnnnnnnnnnnnnnnnnnnnnnnnnnnnnnnnnnnnnnnnnnnnnnnnnnnnnnnnnnnnnnnnnnnnnnnnnnnnnnnnnnnnnnnnnnnnnnnnnnnnnnnnnnnnnnnnnnnnnnnnnnnnnnnnnnnnnnnnnnnnnnnnnnnnnnnnnnnnnnnnnnnnnnnnnnnnnnnnnnnnnnnnnnnnnnnnnnnnnnnnnnnnnnnnnnnnnnnnnnnnnnnnnnnnnnnnnnnnnnnnnnnnnnnnnnnnnnnnnnnnnnnnnnnnnnnnnnnnnnnnnnnnnnnnnnnnnnnnnnnnnnnnnnnnnnnnnnnnnnnnnnnnnnnnnnnnnnnnnnnnnnnnnnnnnnnnnnnnnnnnnnnnnnnnnnnnnnnnnnnnnnnnnnnnnnnnnnnnnnnnnnnnnnnnnnnnnnnnnnnnnnnnnnnnnnnnnnnnnnnnnnnnnnnnnnnnnnnnnnnnnnnnnnnnnnnnnnnnnnnnnnnnnnnnnnnnnnnnnnnnnnnnnnnnnnnnnnnnnnnnnnnnnnnnnnnnnnnnnnnnnnnnnnnnnnnnnnnnnnnnnnnnnnnnnnnnnnnnnnnnnnnnnnnnnnnnnnnnnnnnnnnnnnnnnnnnnnnnnnnnnnnnnnnnnnnnnnnnnnnnnnnnnnnnnnnnnnnnnnnnnnnnnnnnnnnnnnnnnnnnnnnnnnnnnnnnnnnnnnnnnnnnnnnnnnnnnnnnnnnnnnnnnnnnnnnnnnnnnnnnnnnnnnnnnnnnnnnnnnnnnnnnnnnnnnnnnnnnnnnnnnnnnnnnnnnnnnnnnnnnnnnnnnnnnnnnnnnnnnnnnnnnnnnnnnnnnnnnnnnnnnnnnnnnnnnnnnnnnnnnnnnnnnnnnnnnnnnnnnnnnnnnnnnnnnnnnnnnnnnnnnnnnnnnnnnnnnnnnnnnnnnnnnnnnnnnnnnnnnnnnnnnnnnnnnnnnnnnnnnnnnnnnnnnnnnnnnnnnnnnnnnnnnnnnnnnnnnnnnnnnnnnnnnnnnnnnnnnnnnnnnnnnnnnnnnnnnnnnnnnnnnnnnnnnnnnnnnnnnnnnnnnnnnnnnnnnnnnnnnnnnnnnnnnnnnnnnnnnnnnnnnnnnnnnnnnnnnnnnnnnnnnnnnnnnnnnnnnnnnnnnnnnnnnnnnnnnnnnnnnnnnnnnnnnnnnnnnnnnnnnnnnnnnnnnnnnnnnnnnnnnnnnnnnnnnnnnnnnnnnnnnnnnnnnnnnnnnnnnnnnnnnnnnnnnnnnnnnnnnnnnnnnnnnnnnnnnnnnnnnnnnnnnnnnnnnnnnnnnnnnnnnnnnnnnnnnnnnnnnnnnnnnnnnnnnnnnnnnnnnnnnnnnnnnnnnnnnnnnnnnnnnnnnnnnnnnnnnnnnnnnnnnnnnnnnnnnnnnnnnnnnnnnnnnnnnnnnnnnnnnnnnnnnnnnnnnnnnnnnnnnnnnnnnnnnnnnnnnnnnnnnnnnnnnnnnnnnnnnnnnnnnnnnnnnnnnnnnnnnnnnnnnnnnnnnnnnnnnnnnnnnnnnnnnnnnnnnnnnnnnnnnnnnnnnnnnnnnnnnnnnnnnnnnnnnnnnnnnnnnnnnnnnnnnnnnnnnnnnnnnnnnnnnnnnnnnnnnnnnnnnnnnnnnnnnnnnnnnnnnnnnnnnnnnnnnnnnnnnnnnnnnnnnnnnnnnnnnnnnnnnnnnnnnnnnnnnnnnnnnnnnnnnnnnnnnnnnnnnnnnnnnnnnnnnnnnnnnnnnnnnnnnnnnnnnnnnnnnnnnnnnnnnnnnnnnnnnnnnnnnnnnnnnnnnnnnnnnnnnnnnnnnnnnnnnnnnnnnnnnnnnnnnnnnnnnnnnnnnnnnnnnnnnnnnnnnnnnnnnnnnnnnnnnnnnnnnnnnnnnnnnnnnnnnnnnnnnnnnnnnnnnnnnnnnnnnnnnnnnnnnnnnnnnnnnnnnnnnnnnnnnnnnnnnnnnnnnnnnnnnnnnnnnnnnnnnnnnnnnnnnnnnnnnnnnnnnnnnnnnnnnnnnnnnnnnnnnnnnnnnnnnnnnnnnnnnnnnnnnnnnnnnnnnnnnnnnnnnnnnnnnnnnnnnnnnnnnnnnnnnnnnnnnnnnnnnnnnnnnnnnnnnnnnnnnnnnnnnnnnnnnnnnnnnnnnnnnnnnnnnnnnnnnnnnnnnnnnnnnnnnnnnnnnnnnnnnnnnnnnnnnnnnnnnnnnnnnnnnnnnnnnnnnnnnnnnnnnnnnnnnnnnnnnnnnnnnnnnnnnnnnnnnnnnnnnnnnnnnnnnnnnnnnnnnnnnnnnnnnnnnnnnnnnnnnnnnnnnnnnnnnnnnnnnnnnnnnnnnnnnnnnnnnnnnnnnnnnnnnnnnnnnnnnnnnnnnnnnnnnnnnnnnnnnnnnnnnnnnnnnnnnnnnnnnnnnnnnnnnnnnnnnnnnnnnnnnnnnnnnnnnnnnnnnnnnnnnnnnnnnnnnnnnnnnnnnnnnnnnnnnnnnnnnnnnnnnnnnnnnnnnnnnnnnnnnnnnnnnnnnnnnnnnnnnnnnnnnnnnnnnnnnnnnnnnnnnnnnnnnnnnnnnnnnnnnnnnnnnnnnnnnnnnnnnnnnnnnnnnnnnnnnnnnnnnnnnnnnnnnnnnnnnnnnnnnnnnnnnnnnnnnnnnnnnnnnnnnnnnnnnnnnnnnnnnnnnnnnnnnnnnnnnnnnnnnnnnnnnnnnnnnnnnnnnnnnnnnnnnnnnnnnnnnnnnnnnnnnnnnnnnnnnnnnnnnnnnnnnnnnnnnnnnnnnnnnnnnnnnnnnnnnnnnnnnnnnnnnnnnnnnnnnnnnnnnnnnnnnnnnnnnnnnnnnnnnnnnnnnnnnnnnnnnnnnnnnnnnnnnnnnnnnnnnnnnnnnnnnnnnnnnnnnnnnnnnnnnnnnnnnnnnnnnnnnnnnnnnnnnnnnnnnnnnnnnnnnnnnnnnnnnnnnnnnnnnnnnnnnnnnnnnnnnnnnnnnnnnnnnnnnnnnnnnnnnnnnnnnnnnnnnnnnnnnnnnnnnnnnnnnnnnnnnnnnnnnnnnnnnnnnnnnnnnnnnnnnnnnnnnnnnnnnnnnnnnnnnnnnnnnnnnnnnnnnnnnnnnnnnnnnnnnnnnnnnnnnnnnnnnnnnnnnnnnnnnnnnnnnnnnnnnnnnnnnnnnnnnnnnnnnnnnnnnnnnnnnnnnnnnnnnnnnnnnnnnnnnnnnnnnnnnnnnnnnnnnnnnnnnnnnnnnnnnnnnnnnnnnnnnnnnnnnnnnnnnnnnnnnnnnnnnnnnnnnnnnnnnnnnnnnnnnnnnnnnnnnnnnnnnnnnnnnnnnnnnnnnnnnnnnnnnnnnnnnnnnnnnnnnnnnnnnnnnnnnnnnnnnnnnnnnnnnnnnnnnnnnnnnnnnnnnnnnnnnnnnnnnnnnnnnnnnnnnnnnnnnnnnnnnnnnnnnnnnnnnnnnnnnnnnnnnnnnnnnnnnnnnnnnnnnnnnnnnnnnnnnnnnnnnnnnnnnnnnnnnnnnnnnnnnnnnnnnnnnnnnnnnnnnnnnnnnnnnnnnnnnnnnnnnnnnnnnnnnnnnnnnnnnnnnnnnnnnnnnnnnnnnnnnnnnnnnnnnnnnnnnnnnnnnnnnnnnnnnnnnnnnnnnnnnnnnnnnnnnnnnnnnnnnnnnnnnnnnnnnnnnnnnnnnnnnnnnnnnnnnnnnnnnnnnnnnnnnnnnnnnnnnnnnnnnnnnnnnnnnnnnnnnnnnnnnnnnnnnnnnnnnnnnnnnnnnnnnnnnnnnnnnnnnnnnnnnnnnnnnnnnnnnnnnnnnnnnnnnnnnnnnnnnnnnnnnnnnnnnnnnnnnnnnnnnnnnnnnnnnnnnnnnnnnnnnnnnnnnnnnnnnnnnnnnnnnnnnnnnnnnnnnnnnnnnnnnnnnnnnnnnnnnnnnnnnnnnnnnnnnnnnnnnnnnnnnnnnnnnnnnnnnnnnnnnnnnnnnnnnnnnnnnnnnnnnnnnnnnnnnnnnnnnnnnnnnnnnnnnnnnnnnnnnnnnnnnnnnnnnnnnnnnnnnnnnnnnnnnnnnnnnnnnnnnnnnnnnnnnnnnnnnnnnnnnnnnnnnnnnnnnnnnnnnnnnnnnnnnnnnnnnnnnnnnnnnnnnnnnnnnnnnnnnnnnnnnnnnnnnnnnnnnnnnnnnnnnnnnnnnnnnnnnnnnnnnnnnnnnnnnnnnnnnnnnnnnnnnnnnnnnnnnnnnnnnnnnnnnnnnnnnnnnnnnnnnnnnnnnnnnnnnnnnnnnnnnnnnnnnnnnnnnnnnnnnnnnnnnnnnnnnnnnnnnnnnnnnnnnnnnnnnnnnnnnnnnnnnnnnnnnnnnnnnnnnnnnnnnnnnnnnnnnnnnnnnnnnnnnnnnnnnnnnnnnnnnnnnnnnnnnnnnnnnnnnnnnnnnnnnnnnnnnnnnnnnnnnnnnnnnnnnnnnnnnnnnnnnnnnnnnnnnnnnnnnnnnnnnnnnnnnnnnnnnnnnnnnnnnnnnnnnnnnnnnnnnnnnnnnnnnnnnnnnnnnnnnnnnnnnnnnnnnnnnnnnnnnnnnnnnnnnnnnnnnnnnnnnnnnnnnnnnnnnnnnnnnnnnnnnnnnnnnnnnnnnnnnnnnnnnnnnnnnnnnnnnnnnnnnnnnnnnnnnnnnnnnnnnnnnnnnnnnnnnnnnnnnnnnnnnnnnnnnnnnnnnnnnnnnnnnnnnnnnnnnnnnnnnnnnnnnnnnnnnnnnnnnnnnnnnnnnnnnnnnnnnnnnnnnnnnnnnnnnnnnnnnnnnnnnnnnnnnnnnnnnnnnnnnnnnnnnnnnnnnnnnnnnnnnnnnnnnnnnnnnnnnnnnnnnnnnnnnnnnnnnnnnnnnnnnnnnnnnnnnnnnnnnnnnnnnnnnnnnnnnnnnnnnnnnnnnnnnnnnnnnnnnnnnnnnnnnnnnnnnnnnnnnnnnnnnnnnnnnnnnnnnnnnnnnnnnnnnnnnnnnnnnnnnnnnnnnnnnnnnnnnnnnnnnnnnnnnnnnnnnnnnnnnnnnnnnnnnnnnnnnnnnnnnnnnnnnnnnnnnnnnnnnnnnnnnnnnnnnnnnnnnnnnnnnnnnnnnnnnnnnnnnnnnnnnnnnnnnnnnnnnnnnnnnnnnnnnnnnnnnnnnnnnnnnnnnnnnnnnnnnnnnnnnnnnnnnnnnnnnnnnnnnnnnnnnnnnnnnnnnnnnnnnnnnnnnnnnnnnnnnnnnnnnnnnnnnnnnnnnnnnnnnnnnnnnnnnnnnnnnnnnnnnnnnnnnnnnnnnnnnnnnnnnnnnnnnnnnnnnnnnnnnnnnnnnnnnnnnnnnnnnnnnnnnnnnnnnnnnnnnnnnnnnnnnnnnnnnnnnnnnnnnnnnnnnnnnnnnnnnnnnnnnnnnnnnnnnnnnnnnnnnnnnnnnnnnnnnnnnnnnnnnnnnnnnnnnnnnnnnnnnnnnnnnnnnnnnnnnnnnnnnnnnnnnnnnnnnnnnnnnnnnnnnnnnnnnnnnnnnnnnnnnnnnnnnnnnnnnnnnnnnnnnnnnnnnnnnnnnnnnnnnnnnnnnnnnnnnnnnnnnnnnnnnnnnnnnnnnnnnnnnnnnnnnnnnnnnnnnnnnnnnnnnnnnnnnnnnnnnnnnnnnnnnnnnnnnnnnnnnnnnnnnnnnnnnnnnnnnnnnnnnnnnnnnnnnnnnnnnnnnnnnnnnnnnnnnnnnnnnnnnnnnnnnnnnnnnnnnnnnnnnnnnnnnnnnnnnnnnnnnnnnnnnnnnnnnnnnnnnnnnnnnnnnnnnnnnnnnnnnnnnnnnnnnnnnnnnnnnnnnnnnnnnnnnnnnnnnnnnnnnnnnnnnnnnnnnnnnnnnnnnnnnnnnnnnnnnnnnnnnnnnnnnnnnnnnnnnnnnnnnnnnnnnnnnnnnnnnnnnnnnnnnnnnnnnnnnnnnnnnnnnnnnnnnnnnnnnnnnnnnnnnnnnnnnnnnnnnnnnnnnnnnnnnnnnnnnnnnnnnnnnnnnnnnnnnnnnnnnnnnnnnnnnnnnnnnnnnnnnnnnnnnnnnnnnnnnnnnnnnnnnnnnnnnnnnnnnnnnnnnnnnnnnnnnnnnnnnnnnnnnnnnnnnnnnnnnnnnnnnnnnnnnnnnnnnnnnnnnnnnnnnnnnnnnnnnnnnnnnnnnnnnnnnnnnnnnnnnnnnnnnnnnnnnnnnnnnnnnnnnnnnnnnnnnnnnnnnnnnnnnnnnnnnnnnnnnnnnnnnnnnnnnnnnnnnnnnnnnnnnnnnnnnnnnnnnnnnnnnnnnnnnnnnnnnnnnnnnnnnnnnnnnnnnnnnnnnnnnnnnnnnnnnnnnnnnnnnnnnnnnnnnnnnnnnnnnnnnnnnnnnnnnnnnnnnnnnnnnnnnnnnnnnnnnnnnnnnnnnnnnnnnnnnnnnnnnnnnnnnnnnnnnnnnnnnnnnnnnnnnnnnnnnnnnnnnnnnnnnnnnnnnnnnnnnnnnnnnnnnnnnnnnnnnnnnnnnnnnnnnnnnnnnnnnnnnnnnnnnnnnnnnnnnnnnnnnnnnnnnnnnnnnnnnnnnnnnnnnnnnnnnnnnnnnnnnnnnnnnnnnnnnnnnnnnnnnnnnnnnnnnnnnnnnnnnnnnnnnnnnnnnnnnnnnnnnnnnnnnnnnnnnnnnnnnnnnnnnnnnnnnnnnnnnnnnnnnnnnnnnnnnnnnnnnnnnnnnnnnnnnnnnnnnnnnnnnnnnnnnnnnnnnnnnnnnnnnnnnnnnnnnnnnnnnnnnnnnnnnnnnnnnnnnnnnnnnnnnnnnnnnnnnnnnnnnnnnnnnnnnnnnnnnnnnnnnnnnnnnnnnnnnnnnnnnnnnnnnnnnnnnnnnnnnnnnnnnnnnnnnnnnnnnnnnnnnnnnnnnnnnnnnnnnnnnnnnnnnnnnnnnnnnnnnnnnnnnnnnnnnnnnnnnnnnnnnnnnnnnnnnnnnnnnnnnnnnnnnnnnnnnnnnnnnnnnnnnnnnnnnnnnnnnnnnnnnnnnnnnnnnnnnnnnnnnnnnnnnnnnnnnnnnnnnnnnnnnnnnnnnnnnnnnnnnnnnnnnnnnnnnnnnnnnnnnnnnnnnnnnnnnnnnnnnnnnnnnnnnnnnnnnnnnnnnnnnnnnnnnnnnnnnnnnnnnnnnnnnnnnnnnnnnnnnnnnnnnnnnnnnnnnnnnnnnnnnnnnnnnnnnnnnnnnnnnnnnnnnnnnnnnnnnnnnnnnnnnnnnnnnnnnnnnnnnnnnnnnnnnnnnnnnnnnnnnnnnnnnnnnnnnnnnnnnnnnnnnnnnnnnnnnnnnnnnnnnnnnnnnnnnnnnnnnnnnnnnnnnnnnnnnnnnnnnnnnnnnnnnnnnnnnnnnnnnnnnnnnnnnnnnnnnnnnnnnnnnnnnnnnnnnnnnnnnnnnnnnnnnnnnnnnnnnnnnnnnnnnnnnnnnnnnnnnnnnnnnnnnnnnnnnnnnnnnnnnnnnnnnnnnnnnnnnnnnnnnnnnnnnnnnnnnnnnnnnnnnnnnnnnnnnnnnnnnnnnnnnnnnnnnnnnnnnnnnnnnnnnnnnnnnnnnnnnnnnnnnnnnnnnnnnnnnnnnnnnnnnnnnnnnnnnnnnnnnnnnnnnnnnnnnnnnnnnnnnnnnnnnnnnnnnnnnnnnnnnnnnnnnnnnnnnnnnnnnnnnnnnnnnnnnnnnnnnnnnnnnnnnnnnnnnnnnnnnnnnnnnnnnnnnnnnnnnnnnnnnnnnnnnnnnnnnnnnnnnnnnnnnnnnnnnnnnnnnnnnnnnnnnnnnnnnnnnnnnnnnnnnnnnnnnnnnnnnnnnnnnnnnnnnnnnnnnnnnnnnnnnnnnnnnnnnnnnnnnnnnnnnnnnnnnnnnnnnnnnnnnnnnnnnnnnnnnnnnnnnnnnnnnnnnnnnnnnnnnnnnnnnnnnnnnnnnnnnnnnnnnnnnnnnnnnnnnnnnnnnnnnnnnnnnnnnnnnnnnnnnnnnnnnnnnnnnnnnnnnnnnnnnnnnnnnnnnnnnnnnnnnnnnnnnnnnnnnnnnnnnnnnnnnnnnnnnnnnnnnnnnnnnnnnnnnnnnnnnnnnnnnnnnnnnnnnnnnnnnnnnnnnnnnnnnnnnnnnnnnnnnnnnnnnnnnnnnnnnnnnnnnnnnnnnnnnnnnnnnnnnnnnnnnnnnnnnnnnnnnnnnnnnnnnnnnnnnnnnnnnnnnnnnnnnnnnnnnnnnnnnnnnnnnnnnnnnnnnnnnnnnnnnnnnnnnnnnnnnnnnnnnnnnnnnnnnnnnnnnnnnnnnnnnnnnnnnnnnnnnnnnnnnnnnnnnnnnnnnnnnnnnnnnnnnnnnnnnnnnnnnnnnnnnnnnnnnnnnnnnnnnnnnnnnnnnnnnnnnnnnnnnnnnnnnnnnnnnnnnnnnnnnnnnnnnnnnnnnnnnnnnnnnnnnnnnnnnnnnnnnnnnnnnnnnnnnnnnnnnnnnnnnnnnnnnnnnnnnnnnnnnnnnnnnnnnnnnnnnnnnnnnnnnnnnnnnnnnnnnnnnnnnnnnnnnnnnnnnnnnnnnnnnnnnnnnnnnnnnnnnnnnnnnnnnnnnnnnnnnnnnnnnnnnnnnnnnnnnnnnnnnnnnnnnnnnnnnnnnnnnnnnnnnnnnnnnnnnnnnnnnnnnnnnnnnnnnnnnnnnnnnnnnnnnnnnnnnnnnnnnnnnnnnnnnnnnnnnnnnnnnnnnnnnnnnnnnnnnnnnnnnnnnnnnnnnnnnnnnnnnnnnnnnnnnnnnnnnnnnnnnnnnnnnnnnnnnnnnnnnnnnnnnnnnnnnnnnnnnnnnnnnnnnnnnnnnnnnnnnnnnnnnnnnnnnnnnnnnnnnnnnnnnnnnnnnnnnnnnnnnnnnnnnnnnnnnnnnnnnnnnnnnnnnnnnnnnnnnnnnnnnnnnnnnnnnnnnnnnnnnnnnnnnnnnnnnnnnnnnnnnnnnnnnnnnnnnnnnnnnnnnnnnnnnnnnnnnnnnnnnnnnnnnnnnnnnnnnnnnnnnnnnnnnnnnnnnnnnnnnnnnnnnnnnnnnnnnnnnnnnnnnnnnnnnnnnnnnnnnnnnnnnnnnnnnnnnnnnnnnnnnnnnnnnnnnnnnnnnnnnnnnnnnnnnnnnnnnnnnnnnnnnnnnnnnnnnnnnnnnnnnnnnnnnnnnnnnnnnnnnnnnnnnnnnnnnnnnnnnnnnnnnnnnnnnnnnnnnnnnnnnnnnnnnnnnnnnnnnnnnnnnnnnnnnnnnnnnnnnnnnnnnnnnnnnnnnnnnnnnnnnnnnnnnnnnnnnnnnnnnnnnnnnnnnnnnnnnnnnnnnnnnnnnnnnnnnnnnnnnnnnnnnnnnnnnnnnnnnnnnnnnnnnnnnnnnnnnnnnnnnnnnnnnnnnnnnnnnnnnnnnnnnnnnnnnnnnnnnnnnnnnnnnnnnnnnnnnnnnnnnnnnnnnnnnnnnnnnnnnnnnnnnnnnnnnnnnnnnnnnnnnnnnnnnnnnnnnnnnnnnnnnnnnnnnnnnnnnnnnnnnnnnnnnnnnnnnnnnnnnnnnnnnnnnnnnnnnnnnnnnnnnnnnnnnnnnnnnnnnnnnnnnnnnnnnnnnnnnnnnnnnnnnnnnnnnnnnnnnnnnnnnnnnnnnnnnnnnnnnnnnnnnnnnnnnnnnnnnnnnnnnnnnnnnnnnnnnnnnnnnnnnnnnnnnnnnnnnnnnnnnnnnnnnnnnnnnnnnnnnnnnnnnnnnnnnnnnnnnnnnnnnnnnnnnnnnnnnnnnnnnnnnnnnnnnnnnnnnnnnnnnnnnnnnnnnnnnnnnnnnnnnnnnnnnnnnnnnnnnnnnnnnnnnnnnnnnnnnnnnnnnnnnnnnnnnnnnnnnnnnnnnnnnnnnnnnnnnnnnnnnnnnnnnnnnnnnnnnnnnnnnnnnnnnnnnnnnnnnnnnnnnnnnnnnnnnnnnnnnnnnnnnnnnnnnnnnnnnnnnnnnnnnnnnnnnnnnnnnnnnnnnnnnnnnnnnnnnnnnnnnnnnnnnnnnnnnnnnnnnnnnnnnnnnnnnnnnnnnnnnnnnnnnnnnnnnnnnnnnnnnnnnnnnnnnnnnnnnnnnnnnnnnnnnnnnnnnnnnnnnnnnnnnnnnnnnnnnnnnnnnnnnnnnnnnnnnnnnnnnnnnnnnnnnnnnnnnnnnnnnnnnnnnnnnnnnnnnnnnnnnnnnnnnnnnnnnnnnnnnnnnnnnnnnnnnnnnnnnnnnnnnnnnnnnnnnnnnnnnnnnnnnnnnnnnnnnnnnnnnnnnnnnnnnnnnnnnnnnnnnnnnnnnnnnnnnnnnnnnnnnnnnnnnnnnnnnnnnnnnnnnnnnnnnnnnnnnnnnnnnnnnnnnnnnnnnnnnnnnnnnnnnnnnnnnnnnnnnnnnnnnnnnnnnnnnnnnnnnnnnnnnnnnnnnnnnnnnnnnnnnnnnnnnnnnnnnnnnnnnnnnnnnnnnnnnnnnnnnnnnnnnnnnnnnnnnnnnnnnnnnnnnnnnnnnnnnnnnnnnnnnnnnnnnnnnnnnnnnnnnnnnnnnnnnnnnnnnnnnnnnnnnnnnnnnnnnnnnnnnnnnnnnnnnnnnnnnnnnnnnnnnnnnnnnnnnnnnnnnnnnnnnnnnnnnnnnnnnnnnnnnnnnnnnnnnnnnnnnnnnnnnnnnnnnnnnnnnnnnnnnnnnnnnnnnnnnnnnnnnnnnnnnnnnnnnnnnnnnnnnnnnnnnnnnnnnnnnnnnnnnnnnnnnnnnnnnnnnnnnnnnnnnnnnnnnnnnnnnnnnnnnnnnnnnnnnnnnnnnnnnnnnnnnnnnnnnnnnnnnnnnnnnnnnnnnnnnnnnnnnnnnnnnnnnnnnnnnnnnnnnnnnnnnnnnnnnnnnnnnnnnnnnnnnnnnnnnnnnnnnnnnnnnnnnnnnnnnnnnnnnnnnnnnnnnnnnnnnnnnnnnnnnnnnnnnnnnnnnnnnnnnnnnnnnnnnnnnnnnnnnnnnnnnnnnnnnnnnnnnnnnnnnnnnnnnnnnnnnnnnnnnnnnnnnnnnnnnnnnnnnnnnnnnnnnnnnnnnnnnnnnnnnnnnnnnnnnnnnnnnnnnnnnnnnnnnnnnnnnnnnnnnnnnnnnnnnnnnnnnnnnnnnnnnnnnnnnnnnnnnnnnnnnnnnnnnnnnnnnnnnnnnnnnnnnnnnnnnnnnnnnnnnnnnnnnnnnnnnnnnnnnnnnnnnnnnnnnnnnnnnnnnnnnnnnnnnnnnnnnnnnnnnnnnnnnnnnnnnnnnnnnnnnnnnnnnnnnnnnnnnnnnnnnnnnnnnnnnnnnnnnnnnnnnnnnnnnnnnnnnnnnnnnnnnnnnnnnnnnnnnnnnnnnnnnnnnnnnnnnnnnnnnnnnnnnnnnnnnnnnnnnnnnnnnnnnnnnnnnnnnnnnnnnnnnnnnnnnnnnnnnnnnnnnnnnnnnnnnnnnnnnnnnnnnnnnnnnnnnnnnnnnnnnnnnnnnnnnnnnnnnnnnnnnnnnnnnnnnnnnnnnnnnnnnnnnnnnnnnnnnnnnnnnnnnnnnnnnnnnnnnnnnnnnnnnnnnnnnnnnnnnnnnnnnnnnnnnnnnnnnnnnnnnnnnnnnnnnnnnnnnnnnnnnnnnnnnnnnnnnnnnnnnnnnnnnnnnnnnnnnnnnnnnnnnnnnnnnnnnnnnnnnnnnnnnnnnnnnnnnnnnnnnnnnnnnnnnnnnnnnnnnnnnnnnnnnnnnnnnnnnnnnnnnnnnnnnnnnnnnnnnnnnnnnnnnnnnnnnnnnnnnnnnnnnnnnnnnnnnnnnnnnnnnnnnnnnnnnnnnnnnnnnnnnnnnnnnnnnnnnnnnnnnnnnnnnnnnnnnnnnnnnnnnnnnnnnnnnnnnnnnnnnnnnnnnnnnnnnnnnnnnnnnnnnnnnnnnnnnnnnnnnnnnnnnnnnnnnnnnnnnnnnnnnnnnnnnnnnnnnnnnnnnnnnnnnnnnnnnnnnnnnnnnnnnnnnnnnnnnnnnnnnnnnnnnnnnnnnnnnnnnnnnnnnnnnnnnnnnnnnnnnnnnnnnnnnnnnnnnnnnnnnnnnnnnnnnnnnnnnnnnnnnnnnnnnnnnnnnnnnnnnnnnnnnnnnnnnnnnnnnnnnnnnnnnnnnnnnnnnnnnnnnnnnnnnnnnnnnnnnnnnnnnnnnnnnnnnnnnnnnnnnnnnnnnnnnnnnnnnnnnnnnnnnnnnnnnnnnnnnnnnnnnnnnnnnnnnnnnnnnnnnnnnnnnnnnnnnnnnnnnnnnnnnnnnnnnnnnnnnnnnnnnnnnnnnnnnnnnnnnnnnnnnnnnnnnnnnnnnnnnnnnnnnnnnnnnnnnnnnnnnnnnnnnnnnnnnnnnnnnnnnnnnnnnnnnnnnnnnnnnnnnnnnnnnnnnnnnnnnnnnnnnnnnnnnnnnnnnnnnnnnnnnnnnnnnnnnnnnnnnnnnnnnnnnnnnnnnnnnnnnnnnnnnnnnnnnnnnnnnnnnnnnnnnnnnnnnnnnnnnnnnnnnnnnnnnnnnnnnnnnnnnnnnnnnnnnnnnnnnnnnnnnnnnnnnnnnnnnnnnnnnnnnnnnnnnnnnnnnnnnnnnnnnnnnnnnnnnnnnnnnnnnnnnnnnnnnnnnnnnnnnnnnnnnnnnnnnnnnnnnnnnnnnnnnnnnnnnnnnnnnnnnnnnnnnnnnnnnnnnnnnnnnnnnnnnnnnnnnnnnnnnnnnnnnnnnnnnnnnnnnnnnnnnnnnnnnnnnnnnnnnnnnnnnnnnnnnnnnnnnnnnnnnnnnnnnnnnnnnnnnnnnnnnnnnnnnnnnnnnnnnnnnnnnnnnnnnnnnnnnnnnnnnnnnnnnnnnnnnnnnnnnnnnnnnnnnnnnnnnnnnnnnnnnnnnnnnnnnnnnnnnnnnnnnnnnnnnnnnnnnnnnnnnnnnnnnnnnnnnnnnnnnnnnnnnnnnnnnnnnnnnnnnnnnnnnnnnnnnnnnnnnnnnnnnnnnnnnnnnnnnnnnnnnnnnnnnnnnnnnnnnnnnnnnnnnnnnnnnnnnnnnnnnnnnnnnnnnnnnnnnnnnnnnnnnnnnnnnnnnnnnnnnnnnnnnnnnnnnnnnnnnnnnnnnnnnnnnnnnnnnnnnnnnnnnnnnnnnnnnnnnnnnnnnnnnnnnnnnnnnnnnnnnnnnnnnnnnnnnnnnnnnnnnnnnnnnnnnnnnnnnnnnnnnnnnnnnnnnnnnnnnnnnnnnnnnnnnnnnnnnnnnnnnnnnnnnnnnnnnnnnnnnnnnnnnnnnnnnnnnnnnnnnnnnnnnnnnnnnnnnnnnnnnnnnnnnnnnnnnnnnnnnnnnnnnnnnnnnnnnnnnnnnnnnnnnnnnnnnnnnnnnnnnnnnnnnnnnnnnnnnnnnnnnnnnnnnnnnnnnnnnnnnnnnnnnnnnnnnnnnnnnnnnnnnnnnnnnnnnnnnnnnnnnnnnnnnnnnnnnnnnnnnnnnnnnnnnnnnnnnnnnnnnnnnnnnnnnnnnnnnnnnnnnnnnnnnnnnnnnnnnnnnnnnnnnnnnnnnnnnnnnnnnnnnnnnnnnnnnnnnnnnnnnnnnnnnnnnnnnnnnnnnnnnnnnnnnnnnnnnnnnnnnnnnnnnnnnnnnnnnnnnnnnnnnnnnnnnnnnnnnnnnnnnnnnnnnnnnnnnnnnnnnnnnnnnnnnnnnnnnnnnnnnnnnnnnnnnnnnnnnnnnnnnnnnnnnnnnnnnnnnnnnnnnnnnnnnnnnnnnnnnnnnnnnnnnnnnnnnnnnnnnnnnnnnnnnnnnnnnnnnnnnnnnnnnnnnnnnnnnnnnnnnnnnnnnnnnnnnnnnnnnnnnnnnnnnnnnnnnnnnnnnnnnnnnnnnnnnnnnnnnnnnnnnnnnnnnnnnnnnnnnnnnnnnnnnnnnnnnnnnnnnnnnnnnnnnnnnnnnnnnnnnnnnnnnnnnnnnnnnnnnnnnnnnnnnnnnnnnnnnnnnnnnnnnnnnnnnnnnnnnnnnnnnnnnnnnnnnnnnnnnnnnnnnnnnnnnnnnnnnnnnnnnnnnnnnnnnnnnnnnnnnnnnnnnnnnnnnnnnnnnnnnnnnnnnnnnnnnnnnnnnnnnnnnnnnnnnnnnnnnnnnnnnnnnnnnnnnnnnnnnnnnnnnnnnnnnnnnnnnnnnnnnnnnnnnnnnnnnnnnnnnnnnnnnnnnnnnnnnnnnnnnnnnnnnnnnnnnnnnnnnnnnnnnnnnnnnnnnnnnnnnnnnnnnnnnnnnnnnnnnnnnnnnnnnnnnnnnnnnnnnnnnnnnnnnnnnnnnnnnnnnnnnnnnnnnnnnnnnnnnnnnnnnnnnnnnnnnnnnnnnnnnnnnnnnnnnnnnnnnnnnnnnnnnnnnnnnnnnnnnnnnnnnnnnnnnnnnnnnnnnnnnnnnnnnnnnnnnnnnnnnnnnnnnnnnnnnnnnnnnnnnnnnnnnnnnnnnnnnnnnnnnnnnnnnnnnnnnnnnnnnnnnnnnnnnnnnnnnnnnnnnnnnnnnnnnnnnnnnnnnnnnnnnnnnnnnnnnnnnnnnnnnnnnnnnnnnnnnnnnnnnnnnnnnnnnnnnnnnnnnnnnnnnnnnnnnnnnnnnnnnnnnnnnnnnnnnnnnnnnnnnnnnnnnnnnnnnnnnnnnnnnnnnnnnnnnnnnnnnnnnnnnnnnnnnnnnnnnnnnnnnnnnnnnnnnnnnnnnnnnnnnnnnnnnnnnnnnnnnnnnnnnnnnnnnnnnnnnnnnnnnnnnnnnnnnnnnnnnnnnnnnnnnnnnnnnnnnnnnnnnnnnnnnnnnnnnnnnnnnnnnnnnnnnnnnnnnnnnnnnnnnnnnnnnnnnnnnnnnnnnnnnnnnnnnnnnnnnnnnnnnnnnnnnnnnnnnnnnnnnnnnnnnnnnnnnnnnnnnnnnnnnnnnnnnnnnnnnnnnnnnnnnnnnnnnnnnnnnnnnnnnnnnnnnnnnnnnnnnnnnnnnnnnnnnnnnnnnnnnnnnnnnnnnnnnnnnnnnnnnnnnnnnnnnnnnnnnnnnnnnnnnnnnnnnnnnnnnnnnnnnnnnnnnnnnnnnnnnnnnnnnnnnnnnnnnnnnnnnnnnnnnnnnnnnnnnnnnnnnnnnnnnnnnnnnnnnnnnnnnnnnnnnnnnnnnnnnnnnnnnnnnnnnnnnnnnnnnnnnnnnnnnnnnnnnnnnnnnnnnnnnnnnnnnnnnnnnnnnnnnnnnnnnnnnnnnnnnnnnnnnnnnnnnnnnnnnnnnnnnnnnnnnnnnnnnnnnnnnnnnnnnnnnnnnnnnnnnnnnnnnnnnnnnnnnnnnnnnnnnnnnnnnnnnnnnnnnnnnnnnnnnnnnnnnnnnnnnnnnnnnnnnnnnnnnnnnnnnnnnnnnnnnnnnnnnnnnnnnnnnnnnnnnnnnnnnnnnnnnnnnnnnnnnnnnnnnnnnnnnnnnnnnnnnnnnnnnnnnnnnnnnnnnnnnnnnnnnnnnnnnnnnnnnnnnnnnnnnnnnnnnnnnnnnnnnnnnnnnnnnnnnnnnnnnnnnnnnnnnnnnnnnnnnnnnnnnnnnnnnnnnnnnnnnnnnnnnnnnnnnnnnnnnnnnnnnnnnnnnnnnnnnnnnnnnnnnnnnnnnnnnnnnnnnnnnnnnnnnnnnnnnnnnnnnnnnnnnnnnnnnnnnnnnnnnnnnnnnnnnnnnnnnnnnnnnnnnnnnnnnnnnnnnnnnnnnnnnnnnnnnnnnnnnnnnnnnnnnnnnnnnnnnnnnnnnnnnnnnnnnnnnnnnnnnnnnnnnnnnnnnnnnnnnnnnnnnnnnnnnnnnnnnnnnnnnnnnnnnnnnnnnnnnnnnnnnnnnnnnnnnnnnnnnnnnnnnnnnnnnnnnnnnnnnnnnnnnnnnnnnnnnnnnnnnnnnnnnnnnnnnnnnnnnnnnnnnnnnnnnnnnnnnnnnnnnnnnnnnnnnnnnnnnnnnnnnnnnnnnnnnnnnnnnnnnnnnnnnnnnnnnnnnnnnnnnnnnnnnnnnnnnnnnnnnnnnnnnnnnnnnnnnnnnnnnnnnnnnnnnnnnnnnnnnnnnnnnnnnnnnnnnnnnnnnnnnnnnnnnnnnnnnnnnnnnnnnnnnnnnnnnnnnnnnnnnnnnnnnnnnnnnnnnnnnnnnnnnnnnnnnnnnnnnnnnnnnnnnnnnnnnnnnnnnnnnnnnnnnnnnnnnnnnnnnnnnnnnnnnnnnnnnnnnnnnnnnnnnnnnnnnnnnnnnnnnnnnnnnnnnnnnnnnnnnnnnnnnnnnnnnnnnnnnnnnnnnnnnnnnnnnnnnnnnnnnnnnnnnnnnnnnnnnnnnnnnnnnnnnnnnnnnnnnnnnnnnnnnnnnnnnnnnnnnnnnnnnnnnnnnnnnnnnnnnnnnnnnnnnnnnnnnnnnnnnnnnnnnnnnnnnnnnnnnnnnnnnnnnnnnnnnnnnnnnnnnnnnnnnnnnnnnnnnnnnnnnnnnnnnnnnnnnnnnnnnnnnnnnnnnnnnnnnnnnnnnnnnnnnnnnnnnnnnnnnnnnnnnnnnnnnnnnnnnnnnnnnnnnnnnnnnnnnnnnnnnnnnnnnnnnnnnnnnnnnnnnnnnnnnnnnnnnnnnnnnnnnnnnnnnnnnnnnnnnnnnnnnnnnnnnnnnnnnnnnnnnnnnnnnnnnnnnnnnnnnnnnnnnnnnnnnnnnnnnnnnnnnnnnnnnnnnnnnnnnnnnnnnnnnnnnnnnnnnnnnnnnnnnnnnnnnnnnnnnnnnnnnnnnnnnnnnnnnnnnnnnnnnnnnnnnnnnnnnnnnnnnnnnnnnnnnnnnnnnnnnnnnnnnnnnnnnnnnnnnnnnnnnnnnnnnnnnnnnnnnnnnnnnnnnnnnnnnnnnnnnnnnnnnnnnnnnnnnnnnnnnnnnnnnnnnnnnnnnnnnnnnnnnnnnnnnnnnnnnnnnnnnnnnnnnnnnnnnnnnnnnnnnnnnnnnnnnnnnnnnnnnnnnnnnnnnnnnnnnnnnnnnnnnnnnnnnnnnnnnnnnnnnnnnnnnnnnnnnnnnnnnnnnnnnnnnnnnnnnnnnnnnnnnnnnnnnnnnnnnnnnnnnnnnnnnnnnnnnnnnnnnnnnnnnnnnnnnnnnnnnnnnnnnnnnnnnnnnnnnnnnnnnnnnnnnnnnnnnnnnnnnnnnnnnnnnnnnnnnnnnnnnnnnnnnnnnnnnnnnnnnnnnnnnnnnnnnnnnnnnnnnnnnnnnnnnnnnnnnnnnnnnnnnnnnnnnnnnnnnnnnnnnnnnnnnnnnnnnnnnnnnnnnnnnnnnnnnnnnnnnnnnnnnnnnnnnnnnnnnnnnnnnnnnnnnnnnnnnnnnnnnnnnnnnnnnnnnnnnnnnnnnnnnnnnnnnnnnnnnnnnnnnnnnnnnnnnnnnnnnnnnnnnnnnnnnnnnnnnnnnnnnnnnnnnnnnnnnnnnnnnnnnnnnnnnnnnnnnnnnnnnnnnnnnnnnnnnnnnnnnnnnnnnnnnnnnnnnnnnnnnnnnnnnnnnnnnnnnnnnnnnnnnnnnnnnnnnnnnnnnnnnnnnnnnnnnnnnnnnnnnnnnnnnnnnnnnnnnnnnnnnnnnnnnnnnnnnnnnnnnnnnnnnnnnnnnnnnnnnnnnnnnnnnnnnnnnnnnnnnnnnnnnnnnnnnnnnnnnnnnnnnnnnnnnnnnnnnnnnnnnnnnnnnnnnnnnnnnnnnnnnnnnnnnnnnnnnnnnnnnnnnnnnnnnnnnnnnnnnnnnnnnnnnnnnnnnnnnnnnnnnnnnnnnnnnnnnnnnnnnnnnnnnnnnnnnnnnnnnnnnnnnnnnnnnnnnnnnnnnnnnnnnnnnnnnnnnnnnnnnnnnnnnnnnnnnnnnnnnnnnnnnnnnnnnnnnnnnnnnnnnnnnnnnnnnnnnnnnnnnnnnnnnnnnnnnnnnnnnnnnnnnnnnnnnnnnnnnnnnnnnnnnnnnnnnnnnnnnnnnnnnnnnnnnnnnnnnnnnnnnnnnnnnnnnnnnnnnnnnnnnnnnnnnnnnnnnnnnnnnnnnnnnnnnnnnnnnnnnnnnnnnnnnnnnnnnnnnnnnnnnnnnnnnnnnnnnnnnnnnnnnnnnnnnnnnnnnnnnnnnnnnnnnnnnnnnnnnnnnnnnnnnnnnnnnnnnnnnnnnnnnnnnnnnnnnnnnnnnnnnnnnnnnnnnnnnnnnnnnnnnnnnnnnnnnnnnnnnnnnnnnnnnnnnnnnnnnnnnnnnnnnnnnnnnnnnnnnnnnnnnnnnnnnnnnnnnnnnnnnnnnnnnnnnnnnnnnnnnnnnnnnnnnnnnnnnnnnnnnnnnnnnnnnnnnnnnnnnnnnnnnnnnnnnnnnnnnnnnnnnnnnnnnnnnnnnnnnnnnnnnnnnnnnnnnnnnnnnnnnnnnnnnnnnnnnnnnnnnnnnnnnnnnnnnnnnnnnnnnnnnnnnnnnnnnnnnnnnnnnnnnnnnnnnnnnnnnnnnnnnnnnnnnnnnnnnnnnnnnnnnnnnnnnnnnnnnnnnnnnnnnnnnnnnnnnnnnnnnnnnnnnnnnnnnnnnnnnnnnnnnnnnnnnnnnnnnnnnnnnnnnnnnnnnnnnnnnnnnnnnnnnnnnnnnnnnnnnnnnnnnnnnnnnnnnnnnnnnnnnnnnnnnnnnnnnnnnnnnnnnnnnnnnnnnnnnnnnnnnnnnnnnnnnnnnnnnnnnnnnnnnnnnnnnnnnnnnnnnnnnnnnnnnnnnnnnnnnnnnnnnnnnnnnnnnnnnnnnnnnnnnnnnnnnnnnnnnnnnnnnnnnnnnnnnnnnnnnnnnnnnnnnnnnnnnnnnnnnnnnnnnnnnnnnnnnnnnnnnnnnnnnnnnnnnnnnnnnnnnnnnnnnnnnnnnnnnnnnnnnnnnnnnnnnnnnnnnnnnnnnnnnnnnnnnnnnnnnnnnnnnnnnnnnnnnnnnnnnnnnnnnnnnnnnnnnnnnnnnnnnnnnnnnnnnnnnnnnnnnnnnnnnnnnnnnnnnnnnnnnnnnnnnnnnnnnnnnnnnnnnnnnnnnnnnnnnnnnnnnnnnnnnnnnnnnnnnnnnnnnnnnnnnnnnnnnnnnnnnnnnnnnnnnnnnnnnnnnnnnnnnnnnnnnnnnnnnnnnnnnnnnnnnnnnnnnnnnnnnnnnnnnnnnnnnnnnnnnnnnnnnnnnnnnnnnnnnnnnnnnnnnnnnnnnnnnnnnnnnnnnnnnnnnnnnnnnnnnnnnnnnnnnnnnnnnnnnnnnnnnnnnnnnnnnnnnnnnnnnnnnnnnnnnnnnnnnnnnnnnnnnnnnnnnnnnnnnnnnnnnnnnnnnnnnnnnnnnnnnnnnnnnnnnnnnnnnnnnnnnnnnnnnnnnnnnnnnnnnnnnnnnnnnnnnnnnnnnnnnnnnnnnnnnnnnnnnnnnnnnnnnnnnnnnnnnnnnnnnnnnnnnnnnnnnnnnnnnnnnnnnnnnnnnnnnnnnnnnnnnnnnnnnnnnnnnnnnnnnnnnnnnnnnnnnnnnnnnnnnnnnnnnnnnnnnnnnnnnnnnnnnnnnnnnnnnnnnnnnnnnnnnnnnnnnnnnnnnnnnnnnnnnnnnnnnnnnnnnnnnnnnnnnnnnnnnnnnnnnnnnnnnnnnnnnnnnnnnnnnnnnnnnnnnnnnnnnnnnnnnnnnnnnnnnnnnnnnnnnnnnnnnnnnnnnnnnnnnnnnnnnnnnnnnnnnnnnnnnnnnnnnnnnnnnnnnnnnnnnnnnnnnnnnnnnnnnnnnnnnnnnnnnnnnnnnnnnnnnnnnnnnnnnnnnnnnnnnnnnnnnnnnnnnnnnnnnnnnnnnnnnnnnnnnnnnnnnnnnnnnnnnnnnnnnnnnnnnnnnnnnnnnnnnnnnnnnnnnnnnnnnnnnnnnnnnnnnnnnnnnnnnnnnnnnnnnnnnnnnnnnnnnnnnnnnnnnnnnnnnnnnnnnnnnnnnnnnnnnnnnnnnnnnnnnnnnnnnnnnnnnnnnnnnnnnnnnnnnnnnnnnnnnnnnnnnnnnnnnnnnnnnnnnnnnnnnnnnnnnnnnnnnnnnnnnnnnnnnnnnnnnnnnnnnnnnnnnnnnnnnnnnnnnnnnnnnnnnnnnnnnnnnnnnnnnnnnnnnnnnnnnnnnnnnnnnnnnnnnnnnnnnnnnnnnnnnnnnnnnnnnnnnnnnnnnnnnnnnnnnnnnnnnnnnnnnnnnnnnnnnnnnnnnnnnnnnnnnnnnnnnnnnnnnnnnnnnnnnnnnnnnnnnnnnnnnnnnnnnnnnnnnnnnnnnnnnnnnnnnnnnnnnnnnnnnnnnnnnnnnnnnnnnnnnnnnnnnnnnnnnnnnnnnnnnnnnnnnnnnnnnnnnnnnnnnnnnnnnnnnnnnnnnnnnnnnnnnnnnnnnnnnnnnnnnnnnnnnnnnnnnnnnnnnnnnnnnnnnnnnnnnnnnnnnnnnnnnnnnnnnnnnnnnnnnnnnnnnnnnnnnnnnnnnnnnnnnnnnnnnnnnnnnnnnnnnnnnnnnnnnnnnnnnnnnnnnnnnnnnnnnnnnnnnnnnnnnnnnnnnnnnnnnnnnnnnnnnnnnnnnnnnnnnnnnnnnnnnnnnnnnnnnnnnnnnnnnnnnnnnnnnnnnnnnnnnnnnnnnnnnnnnnnnnnnnnnnnnnnnnnnnnnnnnnnnnnnnnnnnnnnnnnnnnnnnnnnnnnnnnnnnnnnnnnnnnnnnnnnnnnnnnnnnnnnnnnnnnnnnnnnnnnnnnnnnnnnnnnnnnnnnnnnnnnnnnnnnnnnnnnnnnnnnnnnnnnnnnnnnnnnnnnnnnnnnnnnnnnnnnnnnnnnnnnnnnnnnnnnnnnnnnnnnnnnnnnnnnnnnnnnnnnnnnnnnnnnnnnnnnnnnnnnnnnnnnnnnnnnnnnnnnnnnnnnnnnnnnnnnnnnnnnnnnnnnnnnnnnnnnnnnnnnnnnnnnnnnnnnnnnnnnnnnnnnnnnnnnnnnnnnnnnnnnnnnnnnnnnnnnnnnnnnnnnnnnnnnnnnnnnnnnnnnnnnnnnnnnnnnnnnnnnnnnnnnnnnnnnnnnnnnnnnnnnnnnnnnnnnnnnnnnnnnnnnnnnnnnnnnnnnnnnnnnnnnnnnnnnnnnnnnnnnnnnnnnnnnnnnnnnnnnnnnnnnnnnnnnnnnnnnnnnnnnnnnnnnnnnnnnnnnnnnnnnnnnnnnnnnnnnnnnnnnnnnnnnnnnnnnnnnnnnnnnnnnnnnnnnnnnnnnnnnnnnnnnnnnnnnnnnnnnnnnnnnnnnnnnnnnnnnnnnnnnnnnnnnnnnnnnnnnnnnnnnnnnnnnnnnnnnnnnnnnnnnnnnnnnnnnnnnnnnnnnnnnnnnnnnnnnnnnnnnnnnnnnnnnnnnnnnnnnnnnnnnnnnnnnnnnnnnnnnnnnnnnnnnnnnnnnnnnnnnnnnnnnnnnnnnnnnnnnnnnnnnnnnnnnnnnnnnnnnnnnnnnnnnnnnnnnnnnnnnnnnnnnnnnnnnnnnnnnnnnnnnnnnnnnnnnnnnnnnnnnnnnnnnnnnnnnnnnnnnnnnnnnnnnnnnnnnnnnnnnnnnnnnnnnnnnnnnnnnnnnnnnnnnnnnnnnnnnnnnnnnnnnnnnnnnnnnnnnnnnnnnnnnnnnnnnnnnnnnnnnnnnnnnnnnnnnnnnnnnnnnnnnnnnnnnnnnnnnnnnnnnnnnnnnnnnnnnnnnnnnnnnnnnnnnnnnnnnnnnnnnnnnnnnnnnnnnnnnnnnnnnnnnnnnnnnnnnnnnnnnnnnnnnnnnnnnnnnnnnnnnnnnnnnnnnnnnnnnnnnnnnnnnnnnnnnnnnnnnnnnnnnnnnnnnnnnnnnnnnnnnnnnnnnnnnnnnnnnnnnnnnnnnnnnnnnnnnnnnnnnnnnnnnnnnnnnnnnnnnnnnnnnnnnnnnnnnnnnnnnnnnnnnnnnnnnnnnnnnnnnnnnnnnnnnnnnnnnnnnnnnnnnnnnnnnnnnnnnnnnnnnnnnnnnnnnnnnnnnnnnnnnnnnnnnnnnnnnnnnnnnnnnnnnnnnnnnnnnnnnnnnnnnnnnnnnnnnnnnnnnnnnnnnnnnnnnnnnnnnnnnnnnnnnnnnnnnnnnnnnnnnnnnnnnnnnnnnnnnnnnnnnnnnnnnnnnnnnnnnnnnnnnnnnnnnnnnnnnnnnnnnnnnnnnnnnnnnnnnnnnnnnnnnnnnnnnnnnnnnnnnnnnnnnnnnnnnnnnnnnnnnnnnnnnnnnnnnnnnnnnnnnnnnnnnnnnnnnnnnnnnnnnnnnnnnnnnnnnnnnnnnnnnnnnnnnnnnnnnnnnnnnnnnnnnnnnnnnnnnnnnnnnnnnnnnnnnnnnnnnnnnnnnnnnnnnnnnnnnnnnnnnnnnnnnnnnnnnnnnnnnnnnnnnnnnnnnnnnnnnnnnnnnnnnnnnnnnnnnnnnnnnnnnnnnnnnnnnnnnnnnnnnnnnnnnnnnnnnnnnnnnnnnnnnnnnnnnnnnnnnnnnnnnnnnnnnnnnnnnnnnnnnnnnnnnnnnnnnnnnnnnnnnnnnnnnnnnnnnnnnnnnnnnnnnnnnnnnnnnnnnnnnnnnnnnnnnnnnnnnnnnnnnnnnnnnnnnnnnnnnnnnnnnnnnnnnnnnnnnnnnnnnnnnnnnnnnnnnnnnnnnnnnnnnnnnnnnnnnnnnnnnnnnnnnnnnnnnnnnnnnnnnnnnnnnnnnnnnnnnnnnnnnnnnnnnnnnnnnnnnnnnnnnnnnnnnnnnnnnnnnnnnnnnnnnnnnnnnnnnnnnnnnnnnnnnnnnnnnnnnnnnnnnnnnnnnnnnnnnnnnnnnnnnnnnnnnnnnnnnnnnnnnnnnnnnnnnnnnnnnnnnnnnnnnnnnnnnnnnnnnnnnnnnnnnnnnnnnnnnnnnnnnnnnnnnnnnnnnnnnnnnnnnnnnnnnnnnnnnnnnnnnnnnnnnnnnnnnnnnnnnnnnnnnnnnnnnnnnnnnnnnnnnnnnnnnnnnnnnnnnnnnnnnnnnnnnnnnnnnnnnnnnnnnnnnnnnnnnnnnnnnnnnnnnnnnnnnnnnnnnnnnnnnnnnnnnnnnnnnnnnnnnnnnnnnnnnnnnnnnnnnnnnnnnnnnnnnnnnnnnnnnnnnnnnnnnnnnnnnnnnnnnnnnnnnnnnnnnnnnnnnnnnnnnnnnnnnnnnnnnnnnnnnnnnnnnnnnnnnnnnnnnnnnnnnnnnnnnnnnnnnnnnnnnnnnnnnnnnnnnnnnnnnnnnnnnnnnnnnnnnnnnnnnnnnnnnnnnnnnnnnnnnnnnnnnnnnnnnnnnnnnnnnnnnnnnnnnnnnnnnnnnnnnnnnnnnnnnnnnnnnnnnnnnnnnnnnnnnnnnnnnnnnnnnnnnnnnnnnnnnnnnnnnnnnnnnnnnnnnnnnnnnnnnnnnnnnnnnnnnnnnnnnnnnnnnnnnnnnnnnnnnnnnnnnnnnnnnnnnnnnnnnnnnnnnnnnnnnnnnnnnnnnnnnnnnnnnnnnnnnnnnnnnnnnnnnnnnnnnnnnnnnnnnnnnnnnnnnnnnnnnnnnnnnnnnnnnnnnnnnnnnnnnnnnnnnnnnnnnnnnnnnnnnnnnnnnnnnnnnnnnnnnnnnnnnnnnnnnnnnnnnnnnnnnnnnnnnnnnnnnnnnnnnnnnnnnnnnnnnnnnnnnnnnnnnnnnnnnnnnnnnnnnnnnnnnnnnnnnnnnnnnnnnnnnnnnnnnnnnnnnnnnnnnnnnnnnnnnnnnnnnnnnnnnnnnnnnnnnnnnnnnnnnnnnnnnnnnnnnnnnnnnnnnnnnnnnnnnnnnnnnnnnnnnnnnnnnnnnnnnnnnnnnnnnnnnnnnnnnnnnnnnnnnnnnnnnnnnnnnnnnnnnnnnnnnnnnnnnnnnnnnnnnnnnnnnnnnnnnnnnnnnnnnnnnnnnnnnnnnnnnnnnnnnnnnnnnnnnnnnnnnnnnnnnnnnnnnnnnnnnnnnnnnnnnnnnnnnnnnnnnnnnnnnnnnnnnnnnnnnnnnnnnnnnnnnnnnnnnnnnnnnnnnnnnnnnnnnnnnnnnnnnnnnnnnnnnnnnnnnnnnnnnnnnnnnnnnnnnnnnnnnnnnnnnnnnnnnnnnnnnnnnnnnnnnnnnnnnnnnnnnnnnnnnnnnnnnnnnnnnnnnnnnnnnnnnnnnnnnnnnnnnnnnnnnnnnnnnnnnnnnnnnnnnnnnnnnnnnnnnnnnnnnnnnnnnnnnnnnnnnnnnnnnnnnnnnnnnnnnnnnnnnnnnnnnnnnnnnnnnnnnnnnnnnnnnnnnnnnnnnnnnnnnnnnnnnnnnnnnnnnnnnnnnnnnnnnnnnnnnnnnnnnnnnnnnnnnnnnnnnnnnnnnnnnnnnnnnnnnnnnnnnnnnnnnnnnnnnnnnnnnnnnnnnnnnnnnnnnnnnnnnnnnnnnnnnnnnnnnnnnnnnnnnnnnnnnnnnnnnnnnnnnnnnnnnnnnnnnnnnnnnnnnnnnnnnnnnnnnnnnnnnnnnnnnnnnnnnnnnnnnnnnnnnnnnnnnnnnnnnnnnnnnnnnnnnnnnnnnnnnnnnnnnnnnnnnnnnnnnnnnnnnnnnnnnnnnnnnnnnnnnnnnnnnnnnnnnnnnnnnnnnnnnnnnnnnnnnnnnnnnnnnnnnnnnnnnnnnnnnnnnnnnnnnnnnnnnnnnnnnnnnnnnnnnnnnnnnnnnnnnnnnnnnnnnnnnnnnnnnnnnnnnnnnnnnnnnnnnnnnnnnnnnnnnnnnnnnnnnnnnnnnnnnnnnnnnnnnnnnnnnnnnnnnnnnnnnnnnnnnnnnnnnnnnnnnnnnnnnnnnnnnnnnnnnnnnnnnnnnnnnnnnnnnnnnnnnnnnnnnnnnnnnnnnnnnnnnnnnnnnnnnnnnnnnnnnnnnnnnnnnnnnnnnnnnnnnnnnnnnnnnnnnnnnnnnnnnnnnnnnnnnnnnnnnnnnnnnnnnnnnnnnnnnnnnnnnnnnnnnnnnnnnnnnnnnnnnnnnnnnnnnnnnnnnnnnnnnnnnnnnnnnnnnnnnnnnnnnnnnnnnnnnnnnnnnnnnnnnnnnnnnnnnnnnnnnnnnnnnnnnnnnnnnnnnnnnnnnnnnnnnnnnnnnnnnnnnnnnnnnnnnnnnnnnnnnnnnnnnnnnnnnnnnnnnnnnnnnnnnnnnnnnnnnnnnnnnnnnnnnnnnnnnnnnnnnnnnnnnnnnnnnnnnnnnnnnnnnnnnnnnnnnnnnnnnnnnnnnnnnnnnnnnnnnnnnnnnnnnnnnnnnnnnnnnnnnnnnnnnnnnnnnnnnnnnnnnnnnnnnnnnnnnnnnnnnnnnnnnnnnnnnnnnnnnnnnnnnnnnnnnnnnnnnnnnnnnnnnnnnnnnnnnnnnnnnnnnnnnnnnnnnnnnnnnnnnnnnnnnnnnnnnnnnnnnnnnnnnnnnnnnnnnnnnnnnnnnnnnnnnnnnnnnnnnnnnnnnnnnnnnnnnnnnnnnnnnnnnnnnnnnnnnnnnnnnnnnnnnnnnnnnnnnnnnnnnnnnnnnnnnnnnnnnnnnnnnnnnnnnnnnnnnnnnnnnnnnnnnnnnnnnnnnnnnnnnnnnnnnnnnnnnnnnnnnnnnnnnnnnnnnnnnnnnnnnnnnnnnnnnnnnnnnnnnnnnnnnnnnnnnnnnnnnnnnnnnnnnnnnnnnnnnnnnnnnnnnnnnnnnnnnnnnnnnnnnnnnnnnnnnnnnnnnnnnnnnnnnnnnnnnnnnnnnnnnnnnnnnnnnnnnnnnnnnnnnnnnnnnnnnnnnnnnnnnnnnnnnnnnnnnnnnnnnnnnnnnnnnnnnnnnnnnnnnnnnnnnnnnnnnnnnnnnnnnnnnnnnnnnnnnnnnnnnnnnnnnnnnnnnnnnnnnnnnnnnnnnnnnnnnnnnnnnnnnnnnnnnnnnnnnnnnnnnnnnnnnnnnnnnnnnnnnnnnnnnnnnnnnnnnnnnnnnnnnnnnnnnnnnnnnnnnnnnnnnnnnnnnnnnnnnnnnnnnnnnnnnnnnnnnnnnnnnnnnnnnnnnnnnnnnnnnnnnnnnnnnnnnnnnnnnnnnnnnnnnnnnnnnnnnnnnnnnnnnnnnnnnnnnnnnnnnnnnnnnnnnnnnnnnnnnnnnnnnnnnnnnnnnnnnnnnnnnnnnnnnnnnnnnnnnnnnnnnnnnnnnnnnnnnnnnnnnnnnnnnnnnnnnnnnnnnnnnnnnnnnnnnnnnnnnnnnnnnnnnnnnnnnnnnnnnnnnnnnnnnnnnnnnnnnnnnnnnnnnnnnnnnnnnnnnnnnnnnnnnnnnnnnnnnnnnnnnnnnnnnnnnnnnnnnnnnnnnnnnnnnnnnnnnnnnnnnnnnnnnnnnnnnnnnnnnnnnnnnnnnnnnnnnnnnnnnnnnnnnnnnnnnnnnnnnnnnnnnnnnnnnnnnnnnnnnnnnnnnnnnnnnnnnnnnnnnnnnnnnnnnnnnnnnnnnnnnnnnnnnnnnnnnnnnnnnnnnnnnnnnnnnnnnnnnnnnnnnnnnnnnnnnnnnnnnnnnnnnnnnnnnnnnnnnnnnnnnnnnnnnnnnnnnnnnnnnnnnnnnnnnnnnnnnnnnnnnnnnnnnnnnnnnnnnnnnnnnnnnnnnnnnnnnnnnnnnnnnnnnnnnnnnnnnnnnnnnnnnnnnnnnnnnnnnnnnnnnnnnnnnnnnnnnnnnnnnnnnnnnnnnnnnnnnnnnnnnnnnnnnnnnnnnnnnnnnnnnnnnnnnnnnnnnnnnnnnnnnnnnnnnnnnnnnnnnnnnnnnnnnnnnnnnnnnnnnnnnnnnnnnnnnnnnnnnnnnnnnnnnnnnnnnnnnnnnnnnnnnnnnnnnnnnnnnnnnnnnnnnnnnnnnnnnnnnnnnnnnnnnnnnnnnnnnnnnnnnnnnnnnnnnnnnnnnnnnnnnnnnnnnnnnnnnnnnnnnnnnnnnnnnnnnnnnnnnnnnnnnnnnnnnnnnnnnnnnnnnnnnnnnnnnnnnnnnnnnnnnnnnnnnnnnnnnnnnnnnnnnnnnnnnnnnnnnnnnnnnnnnnnnnnnnnnnnnnnnnnnnnnnnnnnnnnnnnnnnnnnnnnnnnnnnnnnnnnnnnnnnnnnnnnnnnnnnnnnnnnnnnnnnnnnnnnnnnnnnnnnnnnnnnnnnnnnnnnnnnnnnnnnnnnnnnnnnnnnnnnnnnnnnnnnnnnnnnnnnnnnnnnnnnnnnnnnnnnnnnnnnnnnnnnnnnnnnnnnnnnnnnnnnnnnnnnnnnnnnnnnnnnnnnnnnnnnnnnnnnnnnnnnnnnnnnnnnnnnnnnnnnnnnnnnnnnnnnnnnnnnnnnnnnnnnnnnnnnnnnnnnnnnnnnnnnnnnnnnnnnnnnnnnnnnnnnnnnnnnnnnnnnnnnnnnnnnnnnnnnnnnnnnnnnnnnnnnnnnnnnnnnnnnnnnnnnnnnnnnnnnnnnnnnnnnnnnnnnnnnnnnnnnnnnnnnnnnnnnnnnnnnnnnnnnnnnnnnnnnnnnnnnnnnnnnnnnnnnnnnnnnnnnnnnnnnnnnnnnnnnnnnnnnnnnnnnnnnnnnnnnnnnnnnnnnnnnnnnnnnnnnnnnnnnnnnnnnnnnnnnnnnnnnnnnnnnnnnnnnnnnnnnnnnnnnnnnnnnnnnnnnnnnnnnnnnnnnnnnnnnnnnnnnnnnnnnnnnnnnnnnnnnnnnnnnnnnnnnnnnnnnnnnnnnnnnnnnnnnnnnnnnnnnnnnnnnnnnnnnnnnnnnnnnnnnnnnnnnnnnnnnnnnnnnnnnnnnnnnnnnnnnnnnnnnnnnnnnnnnnnnnnnnnnnnnnnnnnnnnnnnnnnnnnnnnnnnnnnnnnnnnnnnnnnnnnnnnnnnnnnnnnnnnnnnnnnnnnnnnnnnnnnnnnnnnnnnnnnnnnnnnnnnnnnnnnnnnnnnnnnnnnnnnnnnnnnnnnnnnnnnnnnnnnnnnnnnnnnnnnnnnnnnnnnnnnnnnnnnnnnnnnnnnnnnnnnnnnnnnnnnnnnnnnnnnnnnnnnnnnnnnnnnnnnnnnnnnnnnnnnnnnnnnnnnnnnnnnnnnnnnnnnnnnnnnnnnnnnnnnnnnnnnnnnnnnnnnnnnnnnnnnnnnnnnnnnnnnnnnnnnnnnnnnnnnnnnnnnnnnnnnnnnnnnnnnnnnnnnnnnnnnnnnnnnnnnnnnnnnnnnnnnnnnnnnnnnnnnnnnnnnnnnnnnnnnnnnnnnnnnnnnnnnnnnnnnnnnnnnnnnnnnnnnnnnnnnnnnnnnnnnnnnnnnnnnnnnnnnnnnnnnnnnnnnnnnnnnnnnnnnnnnnnnnnnnnnnnnnnnnnnnnnnnnnnnnnnnnnnnnnnnnnnnnnnnnnnnnnnnnnnnnnnnnnnnnnnnnnnnnnnnnnnnnnnnnnnnnnnnnnnnnnnnnnnnnnnnnnnnnnnnnnnnnnnnnnnnnnnnnnnnnnnnnnnnnnnnnnnnnnnnnnnnnnnnnnnnnnnnnnnnnnnnnnnnnnnnnnnnnnnnnnnnnnnnnnnnnnnnnnnnnnnnnnnnnnnnnnnnnnnnnnnnnnnnnnnnnnnnnnnnnnnnnnnnnnnnnnnnnnnnnnnnnnnnnnnnnnnnnnnnnnnnnnnnnnnnnnnnnnnnnnnnnnnnnnnnnnnnnnnnnnnnnnnnnnnnnnnnnnnnnnnnnnnnnnnnnnnnnnnnnnnnnnnnnnnnnnnnnnnnnnnnnnnnnnnnnnnnnnnnnnnnnnnnnnnnnnnnnnnnnnnnnnnnnnnnnnnnnnnnnnnnnnnnnnnnnnnnnnnnnnnnnnnnnnnnnnnnnnnnnnnnnnnnnnnnnnnnnnnnnnnnnnnnnnnnnnnnnnnnnnnnnnnnnnnnnnnnnnnnnnnnnnnnnnnnnnnnnnnnnnnnnnnnnnnnnnnnnnnnnnnnnnnnnnnnnnnnnnnnnnnnnnnnnnnnnnnnnnnnnnnnnnnnnnnnnnnnnnnnnnnnnnnnnnnnnnnnnnnnnnnnnnnnnnnnnnnnnnnnnnnnnnnnnnnnnnnnnnnnnnnnnnnnnnnnnnnnnnnnnnnnnnnnnnnnnnnnnnnnnnnnnnnnnnnnnnnnnnnnnnnnnnnnnnnnnnnnnnnnnnnnnnnnnnnnnnnnnnnnnnnnnnnnnnnnnnnnnnnnnnnnnnnnnnnnnnnnnnnnnnnnnnnnnnnnnnnnnnnnnnnnnnnnnnnnnnnnnnnnnnnnnnnnnnnnnnnnnnnnnnnnnnnnnnnnnnnnnnnnnnnnnnnnnnnnnnnnnnnnnnnnnnnnnnnnnnnnnnnnnnnnnnnnnnnnnnnnnnnnnnnnnnnnnnnnnnnnnnnnnnnnnnnnnnnnnnnnnnnnnnnnnnnnnnnnnnnnnnnnnnnnnnnnnnnnnnnnnnnnnnnnnnnnnnnnnnnnnnnnnnnnnnnnnnnnnnnnnnnnnnnnnnnnnnnnnnnnnnnnnnnnnnnnnnnnnnnnnnnnnnnnnnnnnnnnnnnnnnnnnnnnnnnnnnnnnnnnnnnnnnnnnnnnnnnnnnnnnnnnnnnnnnnnnnnnnnnnnnnnnnnnnnnnnnnnnnnnnnnnnnnnnnnnnnnnnnnnnnnnnnnnnnnnnnnnnnnnnnnnnnnnnnnnnnnnnnnnnnnnnnnnnnnnnnnnnnnnnnnnnnnnnnnnnnnnnnnnnnnnnnnnnnnnnnnnnnnnnnnnnnnnnnnnnnnnnnnnnnnnnnnnnnnnnnnnnnnnnnnnnnnnnnnnnnnnnnnnnnnnnnnnnnnnnnnnnnnnnnnnnnnnnnnnnnnnnnnnnnnnnnnnnnnnnnnnnnnnnnnnnnnnnnnnnnnnnnnnnnnnnnnnnnnnnnnnnnnnnnnnnnnnnnnnnnnnnnnnnnnnnnnnnnnnnnnnnnnnnnnnnnnnnnnnnnnnnnnnnnnnnnnnnnnnnnnnnnnnnnnnnnnnnnnnnnnnnnnnnnnnnnnnnnnnnnnnnnnnnnnnnnnnnnnnnnnnnnnnnnnnnnnnnnnnnnnnnnnnnnnnnnnnnnnnnnnnnnnnnnnnnnnnnnnnnnnnnnnnnnnnnnnnnnnnnnnnnnnnnnnnnnnnnnnnnnnnnnnnnnnnnnnnnnnnnnnnnnnnnnnnnnnnnnnnnnnnnnnnnnnnnnnnnnnnnnnnnnnnnnnnnnnnnnnnnnnnnnnnnnnnnnnnnnnnnnnnnnnnnnnnnnnnnnnnnnnnnnnnnnnnnnnnnnnnnnnnnnnnnnnnnnnnnnnnnnnnnnnnnnnnnnnnnnnnnnnnnnnnnnnnnnnnnnnnnnnnnnnnnnnnnnnnnnnnnnnnnnnnnnnnnnnnnnnnnnnnnnnnnnnnnnnnnnnnnnnnnnnnnnnnnnnnnnnnnnnnnnnnnnnnnnnnnnnnnnnnnnnnnnnnnnnnnnnnnnnnnnnnnnnnnnnnnnnnnnnnnnnnnnnnnnnnnnnnnnnnnnnnnnnnnnnnnnnnnnnnnnnnnnnnnnnnnnnnnnnnnnnnnnnnnnnnnnnnnnnnnnnnnnnnnnnnnnnnnnnnnnnnnnnnnnnnnnnnnnnnnnnnnnnnnnnnnnnnnnnnnnnnnnnnnnnnnnnnnnnnnnnnnnnnnnnnnnnnnnnnnnnnnnnnnnnnnnnnnnnnnnnnnnnnnnnnnnnnnnnnnnnnnnnnnnnnnnnnnnnnnnnnnnnnnnnnnnnnnnnnnnnnnnnnnnnnnnnnnnnnnnnnnnnnnnnnnnnnnnnnnnnnnnnnnnnnnnnnnnnnnnnnnnnnnnnnnnnnnnnnnnnnnnnnnnnnnnnnnnnnnnnnnnnnnnnnnnnnnnnnnnnnnnnnnnnnnnnnnnnnnnnnnnnnnnnnnnnnnnnnnnnnnnnnnnnnnnnnnnnnnnnnnnnnnnnnnnnnnnnnnnnnnnnnnnnnnnnnnnnnnnnnnnnnnnnnnnnnnnnnnnnnnnnnnnnnnnnnnnnnnnnnnnnnnnnnnnnnnnnnnnnnnnnnnnnnnnnnnnnnnnnnnnnnnnnnnnnnnnnnnnnnnnnnnnnnnnnnnnnnnnnnnnnnnnnnnnnnnnnnnnnnnnnnnnnnnnnnnnnnnnnnnnnnnnnnnnnnnnnnnnnnnnnnnnnnnnnnnnnnnnnnnnnnnnnnnnnnnnnnnnnnnnnnnnnnnnnnnnnnnnnnnnnnnnnnnnnnnnnnnnnnnnnnnnnnnnnnnnnnnnnnnnnnnnnnnnnnnnnnnnnnnnnnnnnnnnnnnnnnnnnnnnnnnnnnnnnnnnnnnnnnnnnnnnnnnnnnnnnnnnnnnnnnnnnnnnnnnnnnnnnnnnnnnnnnnnnnnnnnnnnnnnnnnnnnnnnnnnnnnnnnnnnnnnnnnnnnnnnnnnnnnnnnnnnnnnnnnnnnnnnnnnnnnnnnnnnnnnnnnnnnnnnnnnnnnnnnnnnnnnnnnnnnnnnnnnnnnnnnnnnnnnnnnnnnnnnnnnnnnnnnnnnnnnnnnnnnnnnnnnnnnnnnnnnnnnnnnnnnnnnnnnnnnnnnnnnnnnnnnnnnnnnnnnnnnnnnnnnnnnnnnnnnnnnnnnnnnnnnnnnnnnnnnnnnnnnnnnnnnnnnnnnnnnnnnnnnnnnnnnnnnnnnnnnnnnnnnnnnnnnnnnnnnnnnnnnnnnnnnnnnnnnnnnnnnnnnnnnnnnnnnnnnnnnnnnnnnnnnnnnnnnnnnnnnnnnnnnnnnnnnnnnnnnnnnnnnnnnnnnnnnnnnnnnnnnnnnnnnnnnnnnnnnnnnnnnnnnnnnnnnnnnnnnnnnnnnnnnnnnnnnnnnnnnnnnnnnnnnnnnnnnnnnnnnnnnnnnnnnnnnnnnnnnnnnnnnnnnnnnnnnnnnnnnnnnnnnnnnnnnnnnnnnnnnnnnnnnnnnnnnnnnnnnnnnnnnnnnnnnnnnnnnnnnnnnnnnnnnnnnnnnnnnnnnnnnnnnnnnnnnnnnnnnnnnnnnnnnnnnnnnnnnnnnnnnnnnnnnnnnnnnnnnnnnnnnnnnnnnnnnnnnnnnnnnnnnnnnnnnnnnnnnnnnnnnnnnnnnnnnnnnnnnnnnnnnnnnnnnnnnnnnnnnnnnnnnnnnnnnnnnnnnnnnnnnnnnnnnnnnnnnnnnnnnnnnnnnnnnnnnnnnnnnnnnnnnnnnnnnnnnnnnnnnnnnnnnnnnnnnnnnnnnnnnnnnnnnnnnnnnnnnnnnnnnnnnnnnnnnnnnnnnnnnnnnnnnnnnnnnnnnnnnnnnnnnnnnnnnnnnnnnnnnnnnnnnnnnnnnnnnnnnnnnnnnnnnnnnnnnnnnnnnnnnnnnnnnnnnnnnnnnnnnnnnnnnnnnnnnnnnnnnnnnnnnnnnnnnnnnnnnnnnnnnnnnnnnnnnnnnnnnnnnnnnnnnnnnnnnnnnnnnnnnnnnnnnnnnnnnnnnnnnnnnnnnnnnnnnnnnnnnnnnnnnnnnnnnnnnnnnnnnnnnnnnnnnnnnnnnnnnnnnnnnnnnnnnnnnnnnnnnnnnnnnnnnnnnnnnnnnnnnnnnnnnnnnnnnnnnnnnnnnnnnnnnnnnnnnnnnnnnnnnnnnnnnnnnnnnnnnnnnnnnnnnnnnnnnnnnnnnnnnnnnnnnnnnnnnnnnnnnnnnnnnnnnnnnnnnnnnnnnnnnnnnnnnnnnnnnnnnnnnnnnnnnnnnnnnnnnnnnnnnnnnnnnnnnnnnnnnnnnnnnnnnnnnnnnnnnnnnnnnnnnnnnnnnnnnnnnnnnnnnnnnnnnnnnnnnnnnnnnnnnnnnnnnnnnnnnnnnnnnnnnnnnnnnnnnnnnnnnnnnnnnnnnnnnnnnnnnnnnnnnnnnnnnnnnnnnnnnnnnnnnnnnnnnnnnnnnnnnnnnnnnnnnnnnnnnnnnnnnnnnnnnnnnnnnnnnnnnnnnnnnnnnnnnnnnnnnnnnnnnnnnnnnnnnnnnnnnnnnnnnnnnnnnnnnnnnnnnnnnnnnnnnnnnnnnnnnnnnnnnnnnnnnnnnnnnnnnnnnnnnnnnnnnnnnnnnnnnnnnnnnnnnnnnnnnnnnnnnnnnnnnnnnnnnnnnnnnnnnnnnnnnnnnnnnnnnnnnnnnnnnnnnnnnnnnnnnnnnnnnnnnnnnnnnnnnnnnnnnnnnnnnnnnnnnnnnnnnnnnnnnnnnnnnnnnnnnnnnnnnnnnnnnnnnnnnnnnnnnnnnnnnnnnnnnnnnnnnnnnnnnnnnnnnnnnnnnnnnnnnnnnnnnnnnnnnnnnnnnnnnnnnnnnnnnnnnnnnnnnnnnnnnnnnnnnnnnnnnnnnnnnnnnnnnnnnnnnnnnnnnnnnnnnnnnnnnnnnnnnnnnnnnnnnnnnnnnnnnnnnnnnnnnnnnnnnnnnnnnnnnnnnnnnnnnnnnnnnnnnnnnnnnnnnnnnnnnnnnnnnnnnnnnnnnnnnnnnnnnnnnnnnnnnnnnnnnnnnnnnnnnnnnnnnnnnnnnnnnnnnnnnnnnnnnnnnnnnnnnnnnnnnnnnnnnnnnnnnnnnnnnnnnnnnnnnnnnnnnnnnnnnnnnnnnnnnnnnnnnnnnnnnnnnnnnnnnnnnnnnnnnnnnnnnnnnnnnnnnnnnnnnnnnnnnnnnnnnnnnnnnnnnnnnnnnnnnnnnnnnnnnnnnnnnnnnnnnnnnnnnnnnnnnnnnnnnnnnnnnnnnnnnnnnnnnnnnnnnnnnnnnnnnnnnnnnnnnnnnnnnnnnnnnnnnnnnnnnnnnnnnnnnnnnnnnnnnnnnnnnnnnnnnnnnnnnnnnnnnnnnnnnnnnnnnnnnnnnnnnnnnnnnnnnnnnnnnnnnnnnnnnnnnnnnnnnnnnnnnnnnnnnnnnnnnnnnnnnnnnnnnnnnnnnnnnnnnnnnnnnnnnnnnnnnnnnnnnnnnnnnnnnnnnnnnnnnnnnnnnnnnnnnnnnnnnnnnnnnnnnnnnnnnnnnnnnnnnnnnnnnnnnnnnnnnnnnnnnnnnnnnnnnnnnnnnnnnnnnnnnnnnnnnnnnnnnnnnnnnnnnnnnnnnnnnnnnnnnnnnnnnnnnnnnnnnnnnnnnnnnnnnnnnnnnnnnnnnnnnnnnnnnnnnnnnnnnnnnnnnnnnnnnnnnnnnnnnnnnnnnnnnnnnnnnnnnnnnnnnnnnnnnnnnnnnnnnnnnnnnnnnnnnnnnnnnnnnnnnnnnnnnnnnnnnnnnnnnnnnnnnnnnnnnnnnnnnnnnnnnnnnnnnnnnnnnnnnnnnnnnnnnnnnnnnnnnnnnnnnnnnnnnnnnnnnnnnnnnnnnnnnnnnnnnnnnnnnnnnnnnnnnnnnnnnnnnnnnnnnnnnnnnnnnnnnnnnnnnnnnnnnnnnnnnnnnnnnnnnnnnnnnnnnnnnnnnnnnnnnnnnnnnnnnnnnnnnnnnnnnnnnnnnnnnnnnnnnnnnnnnnnnnnnnnnnnnnnnnnnnnnnnnnnnnnnnnnnnnnnnnnnnnnnnnnnnnnnnnnnnnnnnnnnnnnnnnnnnnnnnnnnnnnnnnnnnnnnnnnnnnnnnnnnnnnnnnnnnnnnnnnnnnnnnnnnnnnnnnnnnnnnnnnnnnnnnnnnnnnnnnnnnnnnnnnnnnnnnnnnnnnnnnnnnnnnnnnnnnnnnnnnnnnnnnnnnnnnnnnnnnnnnnnnnnnnnnnnnnnnnnnnnnnnnnnnnnnnnnnnnnnnnnnnnnnnnnnnnnnnnnnnnnnnnnnnnnnnnnnnnnnnnnnnnnnnnnnnnnnnnnnnnnnnnnnnnnnnnnnnnnnnnnnnnnnnnnnnnnnnnnnnnnnnnnnnnnnnnnnnnnnnnnnnnnnnnnnnnnnnnnnnnnnnnnnnnnnnnnnnnnnnnnnnnnnnnnnnnnnnnnnnnnnnnnnnnnnnnnnnnnnnnnnnnnnnnnnnnnnnnnnnnnnnnnnnnnnnnnnnnnnnnnnnnnnnnnnnnnnnnnnnnnnnnnnnnnnnnnnnnnnnnnnnnnnnnnnnnnnnnnnnnnnnnnnnnnnnnnnnnnnnnnnnnnnnnnnnnnnnnnnnnnnnnnnnnnnnnnnnnnnnnnnnnnnnnnnnnnnnnnnnnnnnnnnnnnnnnnnnnnnnnnnnnnnnnnnnnnnnnnnnnnnnnnnnnnnnnnnnnnnnnnnnnnnnnnnnnnnnnnnnnnnnnnnnnnnnnnnnnnnnnnnnnnnnnnnnnnnnnnnnnnnnnnnnnnnnnnnnnnnnnnnnnnnnnnnnnnnnnnnnnnnnnnnnnnnnnnnnnnnnnnnnnnnnnnnnnnnnnnnnnnnnnnnnnnnnnnnnnnnnnnnnnnnnnnnnnnnnnnnnnnnnnnnnnnnnnnnnnnnnnnnnnnnnnnnnnnnnnnnnnnnnnnnnnnnnnnnnnnnnnnnnnnnnnnnnnnnnnnnnnnnnnnnnnnnnnnnnnnnnnnnnnnnnnnnnnnnnnnnnnnnnnnnnnnnnnnnnnnnnnnnnnnnnnnnnnnnnnnnnnnnnnnnnnnnnnnnnnnnnnnnnnnnnnnnnnnnnnnnnnnnnnnnnnnnnnnnnnnnnnnnnnnnnnnnnnnnnnnnnnnnnnnnnnnnnnnnnnnnnnnnnnnnnnnnnnnnnnnnnnnnnnnnnnnnnnnnnnnnnnnnnnnnnnnnnnnnnnnnnnnnnnnnnnnnnnnnnnnnnnnnnnnnnnnnnnnnnnnnnnnnnnnnnnnnnnnnnnnnnnnnnnnnnnnnnnnnnnnnnnnnnnnnnnnnnnnnnnnnnnnnnnnnnnnnnnnnnnnnnnnnnnnnnnnnnnnnnnnnnnnnnnnnnnnnnnnnnnnnnnnnnnnnnnnnnnnnnnnnnnnnnnnnnnnnnnnnnnnnnnnnnnnnnnnnnnnnnnnnnnnnnnnnnnnnnnnnnnnnnnnnnnnnnnnnnnnnnnnnnnnnnnnnnnnnnnnnnnnnnnnnnnnnnnnnnnnnnnnnnnnnnnnnnnnnnnnnnnnnnnnnnnnnnnnnnnnnnnnnnnnnnnnnnnnnnnnnnnnnnnnnnnnnnnnnnnnnnnnnnnnnnnnnnnnnnnnnnnnnnnnnnnnnnnnnnnnnnnnnnnnnnnnnnnnnnnnnnnnnnnnnnnnnnnnnnnnnnnnnnnnnnnnnnnnnnnnnnnnnnnnnnnnnnnnnnnnnnnnnnnnnnnnnnnnnnnnnnnnnnnnnnnnnnnnnnnnnnnnnnnnnnnnnnnnnnnnnnnnnnnnnnnnnnnnnnnnnnnnnnnnnnnnnnnnnnnnnnnnnnnnnnnnnnnnnnnnnnnnnnnnnnnnnnnnnnnnnnnnnnnnnnnnnnnnnnnnnnnnnnnnnnnnnnnnnnnnnnnnnnnnnnnnnnnnnnnnnnnnnnnnnnnnnnnnnnnnnnnnnnnnnnnnnnnnnnnnnnnnnnnnnnnnnnnnnnnnnnnnnnnnnnnnnnnnnnnnnnnnnnnnnnnnnnnnnnnnnnnnnnnnnnnnnnnnnnnnnnnnnnnnnnnnnnnnnnnnnnnnnnnnnnnnnnnnnnnnnnnnnnnnnnnnnnnnnnnnnnnnnnnnnnnnnnnnnnnnnnnnnnnnnnnnnnnnnnnnnnnnnnnnnnnnnnnnnnnnnnnnnnnnnnnnnnnnnnnnnnnnnnnnnnnnnnnnnnnnnnnnnnnnnnnnnnnnnnnnnnnnnnnnnnnnnnnnnnnnnnnnnnnnnnnnnnnnnnnnnnnnnnnnnnnnnnnnnnnnnnnnnnnnnnnnnnnnnnnnnnnnnnnnnnnnnnnnnnnnnnnnnnnnnnnnnnnnnnnnnnnnnnnnnnnnnnnnnnnnnnnnnnnnnnnnnnnnnnnnnnnnnnnnnnnnnnnnnnnnnnnnnnnnnnnnnnnnnnnnnnnnnnnnnnnnnnnnnnnnnnnnnnnnnnnnnnnnnnnnnnnnnnnnnnnnnnnnnnnnnnnnnnnnnnnnnnnnnnnnnnnnnnnnnnnnnnnnnnnnnnnnnnnnnnnnnnnnnnnnnnnnnnnnnnnnnnnnnnnnnnnnnnnnnnnnnnnnnnnnnnnnnnnnnnnnnnnnnnnnnnnnnnnnnnnnnnnnnnnnnnnnnnnnnnnnnnnnnnnnnnnnnnnnnnnnnnnnnnnnnnnnnnnnnnnnnnnnnnnnnnnnnnnnnnnnnnnnnnnnnnnnnnnnnnnnnnnnnnnnnnnnnnnnnnnnnnnnnnnnnnnnnnnnnnnnnnnnnnnnnnnnnnnnnnnnnnnnnnnnnnnnnnnnnnnnnnnnnnnnnnnnnnnnnnnnnnnnnnnnnnnnnnnnnnnnnnnnnnnnnnnnnnnnnnnnnnnnnnnnnnnnnnnnnnnnnnnnnnnnnnnnnnnnnnnnnnnnnnnnnnnnnnnnnnnnnnnnnnnnnnnnnnnnnnnnnnnnnnnnnnnnnnnnnnnnnnnnnnnnnnnnnnnnnnnnnnnnnnnnnnnnnnnnnnnnnnnnnnnnnnnnnnnnnnnnnnnnnnnnnnnnnnnnnnnnnnnnnnnnnnnnnnnnnnnnnnnnnnnnnnnnnnnnnnnnnnnnnnnnnnnnnnnnnnnnnnnnnnnnnnnnnnnnnnnnnnnnnnnnnnnnnnnnnnnnnnnnnnnnnnnnnnnnnnnnnnnnnnnnnnnnnnnnnnnnnnnnnnnnnnnnnnnnnnnnnnnnnnnnnnnnnnnnnnnnnnnnnnnnnnnnnnnnnnnnnnnnnnnnnnnnnnnnnnnnnnnnnnnnnnnnnnnnnnnnnnnnnnnnnnnnnnnnnnnnnnnnnnnnnnnnnnnnnnnnnnnnnnnnnnnnnnnnnnnnnnnnnnnnnnnnnnnnnnnnnnnnnnnnnnnnnnnnnnnnnnnnnnnnnnnnnnnnnnnnnnnnnnnnnnnnnnnnnnnnnnnnnnnnnnnnnnnnnnnnnnnnnnnnnnnnnnnnnnnnnnnnnnnnnnnnnnnnnnnnnnnnnnnnnnnnnnnnnnnnnnnnnnnnnnnnnnnnnnnnnnnnnnnnnnnnnnnnnnnnnnnnnnnnnnnnnnnnnnnnnnnnnnnnnnnnnnnnnnnnnnnnnnnnnnnnnnnnnnnnnnnnnnnnnnnnnnnnnnnnnnnnnnnnnnnnnnnnnnnnnnnnnnnnnnnnnnnnnnnnnnnnnnnnnnnnnnnnnnnnnnnnnnnnnnnnnnnnnnnnnnnnnnnnnnnnnnnnnnnnnnnnnnnnnnnnnnnnnnnnnnnnnnnnnnnnnnnnnnnnnnnnnnnnnnnnnnnnnnnnnnnnnnnnnnnnnnnnnnnnnnnnnnnnnnnnnnnnnnnnnnnnnnnnnnnnnnnnnnnnnnnnnnnnnnnnnnnnnnnnnnnnnnnnnnnnnnnnnnnnnnnnnnnnnnnnnnnnnnnnnnnnnnnnnnnnnnnnnnnnnnnnnnnnnnnnnnnnnnnnnnnnnnnnnnnnnnnnnnnnnnnnnnnnnnnnnnnnnnnnnnnnnnnnnnnnnnnnnnnnnnnnnnnnnnnnnnnnnnnnnnnnnnnnnnnnnnnnnnnnnnnnnnnnnnnnnnnnnnnnnnnnnnnnnnnnnnnnnnnnnnnnnnnnnnnnnnnnnnnnnnnnnnnnnnnnnnnnnnnnnnnnnnnnnnnnnnnnnnnnnnnnnnnnnnnnnnnnnnnnnnnnnnnnnnnnnnnnnnnnnnnnnnnnnnnnnnnnnnnnnnnnnnnnnnnnnnnnnnnnnnnnnnnnnnnnnnnnnnnnnnnnnnnnnnnnnnnnnnnnnnnnnnnnnnnnnnnnnnnnnnnnnnnnnnnnnnnnnnnnnnnnnnnnnnnnnnnnnnnnnnnnnnnnnnnnnnnnnnnnnnnnnnnnnnnnnnnnnnnnnnnnnnnnnnnnnnnnnnnnnnnnnnnnnnnnnnnnnnnnnnnnnnnnnnnnnnnnnnnnnnnnnnnnnnnnnnnnnnnnnnnnnnnnnnnnnnnnnnnnnnnnnnnnnnnnnnnnnnnnnnnnnnnnnnnnnnnnnnnnnnnnnnnnnnnnnnnnnnnnnnnnnnnnnnnnnnnnnnnnnnnnnnnnnnnnnnnnnnnnnnnnnnnnnnnnnnnnnnnnnnnnnnnnnnnnnnnnnnnnnnnnnnnnnnnnnnnnnnnnnnnnnnnnnnnnnnnnnnnnnnnnnnnnnnnnnnnnnnnnnnnnnnnnnnnnnnnnnnnnnnnnnnnnnnnnnnnnnnnnnnnnnnnnnnnnnnnnnnnnnnnnnnnnnnnnnnnnnnnnnnnnnnnnnnnnnnnnnnnnnnnnnnnnnnnnnnnnnnnnnnnnnnnnnnnnnnnnnnnnnnnnnnnnnnnnnnnnnnnnnnnnnnnnnnnnnnnnnnnnnnnnnnnnnnnnnnnnnnnnnnnnnnnnnnnnnnnnnnnnnnnnnnnnnnnnnnnnnnnnnnnnnnnnnnnnnnnnnnnnnnnnnnnnnnnnnnnnnnnnnnnnnnnnnnnnnnnnnnnnnnnnnnnnnnnnnnnnnnnnnnnnnnnnnnnnnnnnnnnnnnnnnnnnnnnnnnnnnnnnnnnnnnnnnnnnnnnnnnnnnnnnnnnnnnnnnnnnnnnnnnnnnnnnnnnnnnnnnnnnnnnnnnnnnnnnnnnnnnnnnnnnnnnnnnnnnnnnnnnnnnnnnnnnnnnnnnnnnnnnnnnnnnnnnnnnnnnnnnnnnnnnnnnnnnnnnnnnnnnnnnnnnnnnnnnnnnnnnnnnnnnnnnnnnnnnnnnnnnnnnnnnnnnnnnnnnnnnnnnnnnnnnnnnnnnnnnnnnnnnnnnnnnnnnnnnnnnnnnnnnnnnnnnnnnnnnnnnnnnnnnnnnnnnnnnnnnnnnnnnnnnnnnnnnnnnnnnnnnnnnnnnnnnnnnnnnnnnnnnnnnnnnnnnnnnnnnnnnnnnnnnnnnnnnnnnnnnnnnnnnnnnnnnnnnnnnnnnnnnnnnnnnnnnnnnnnnnnnnnnnnnnnnnnnnnnnnnnnnnnnnnnnnnnnnnnnnnnnnnnnnnnnnnnnnnnnnnnnnnnnnnnnnnnnnnnnnnnnnnnnnnnnnnnnnnnnnnnnnnnnnnnnnnnnnnnnnnnnnnnnnnnnnnnnnnnnnnnnnnnnnnnnnnnnnnnnnnnnnnnnnnnnnnnnnnnnnnnnnnnnnnnnnnnnnnnnnnnnnnnnnnnnnnnnnnnnnnnnnnnnnnnnnnnnnnnnnnnnnnnnnnnnnnnnnnnnnnnnnnnnnnnnnnnnnnnnnnnnnnnnnnnnnnnnnnnnnnnnnnnnnnnnnnnnnnnnnnnnnnnnnnnnnnnnnnnnnnnnnnnnnnnnnnnnnnnnnnnnnnnnnnnnnnnnnnnnnnnnnnnnnnnnnnnnnnnnnnnnnnnnnnnnnnnnnnnnnnnnnnnnnnnnnnnnnnnnnnnnnnnnnnnnnnnnnnnnnnnnnnnnnnnnnnnnnnnnnnnnnnnnnnnnnnnnnnnnnnnnnnnnnnnnnnnnnnnnnnnnnnnnnnnnnnnnnnnnnnnnnnnnnnnnnnnnnnnnnnnnnnnnnnnnnnnnnnnnnnnnnnnnnnnnnnnnnnnnnnnnnnnnnnnnnnnnnnnnnnnnnnnnnnnnnnnnnnnnnnnnnnnnnnnnnnnnnnnnnnnnnnnnnnnnnnnnnnnnnnnnnnnnnnnnnnnnnnnnnnnnnnnnnnnnnnnnnnnnnnnnnnnnnnnnnnnnnnnnnnnnnnnnnnnnnnnnnnnnnnnnnnnnnnnnnnnnnnnnnnnnnnnnnnnnnnnnnnnnnnnnnnnnnnnnnnnnnnnnnnnnnnnnnnnnnnnnnnnnnnnnnnnnnnnnnnnnnnnnnnnnnnnnnnnnnnnnnnnnnnnnnnnnnnnnnnnnnnnnnnnnnnnnnnnnnnnnnnnnnnnnnnnnnnnnnnnnnnnnnnnnnnnnnnnnnnnnnnnnnnnnnnnnnnnnnnnnnnnnnnnnnnnnnnnnnnnnnnnnnnnnnnnnnnnnnnnnnnnnnnnnnnnnnnnnnnnnnnnnnnnnnnnnnnnnnnnnnnnnnnnnnnnnnnnnnnnnnnnnnnnnnnnnnnnnnnnnnnnnnnnnnnnnnnnnnnnnnnnnnnnnnnnnnnnnnnnnnnnnnnnnnnnnnnnnnnnnnnnnnnnnnnnnnnnnnnnnnnnnnnnnnnnnnnnnnnnnnnnnnnnnnnnnnnnnnnnnnnnnnnnnnnnnnnnnnnnnnnnnnnnnnnnnnnnnnnnnnnnnnnnnnnnnnnnnnnnnnnnnnnnnnnnnnnnnnnnnnnnnnnnnnnnnnnnnnnnnnnnnnnnnnnnnnnnnnnnnnnnnnnnnnnnnnnnnnnnnnnnnnnnnnnnnnnnnnnnnnnnnnnnnnnnnnnnnnnnnnnnnnnnnnnnnnnnnnnnnnnnnnnnnnnnnnnnnnnnnnnnnnnnnnnnnnnnnnnnnnnnnnnnnnnnnnnnnnnnnnnnnnnnnnnnnnnnnnnnnnnnnnnnnnnnnnnnnnnnnnnnnnnnnnnnnnnnnnnnnnnnnnnnnnnnnnnnnnnnnnnnnnnnnnnnnnnnnnnnnnnnnnnnnnnnnnnnnnnnnnnnnnnnnnnnnnnnnnnnnnnnnnnnnnnnnnnnnnnnnnnnnnnnnnnnnnnnnnnnnnnnnnnnnnnnnnnnnnnnnnnnnnnnnnnnnnnnnnnnnnnnnnnnnnnnnnnnnnnnnnnnnnnnnnnnnnnnnnnnnnnnnnnnnnnnnnnnnnnnnnnnnnnnnnnnnnnnnnnnnnnnnnnnnnnnnnnnnnnnnnnnnnnnnnnnnnnnnnnnnnnnnnnnnnnnnnnnnnnnnnnnnnnnnnnnnnnnnnnnnnnnnnnnnnnnnnnnnnnnnnnnnnnnnnnnnnnnnnnnnnnnnnnnnnnnnnnnnnnnnnnnnnnnnnnnnnnnnnnnnnnnnnnnnnnnnnnnnnnnnnnnnnnnnnnnnnnnnnnnnnnnnnnnnnnnnnnnnnnnnnnnnnnnnnnnnnnnnnnnnnnnnnnnnnnnnnnnnnnnnnnnnnnnnnnnnnnnnnnnnnnnnnnnnnnnnnnnnnnnnnnnnnnnnnnnnnnnnnnnnnnnnnnnnnnnnnnnnnnnnnnnnnnnnnnnnnnnnnnnnnnnnnnnnnnnnnnnnnnnnnnnnnnnnnnnnnnnnnnnnnnnnnnnnnnnnnnnnnnnnnnnnnnnnnnnnnnnnnnnnnnnnnnnnnnnnnnnnnnnnnnnnnnnnnnnnnnnnnnnnnnnnnnnnnnnnnnnnnnnnnnnnnnnnnnnnnnnnnnnnnnnnnnnnnnnnnnnnnnnnnnnnnnnnnnnnnnnnnnnnnnnnnnnnnnnnnnnnnnnnnnnnnnnnnnnnnnnnnnnnnnnnnnnnnnnnnnnnnnnnnnnnnnnnnnnnnnnnnnnnnnnnnnnnnnnnnnnnnnnnnnnnnnnnnnnnnnnnnnnnnnnnnnnnnnnnnnnnnnnnnnnnnnnnnnnnnnnnnnnnnnnnnnnnnnnnnnnnnnnnnnnnnnnnnnnnnnnnnnnnnnnnnnnnnnnnnnnnnnnnnnnnnnnnnnnnnnnnnnnnnnnnnnnnnnnnnnnnnnnnnnnnnnnnnnnnnnnnnnnnnnnnnnnnnnnnnnnnnnnnnnnnnnnnnnnnnnnnnnnnnnnnnnnnnnnnnnnnnnnnnnnnnnnnnnnnnnnnnnnnnnnnnnnnnnnnnnnnnnnnnnnnnnnnnnnnnnnnnnnnnnnnnnnnnnnnnnnnnnnnnnnnnnnnnnnnnnnnnnnnnnnnnnnnnnnnnnnnnnnnnnnnnnnnnnnnnnnnnnnnnnnnnnnnnnnnnnnnnnnnnnnnnnnnnnnnnnnnnnnnnnnnnnnnnnnnnnnnnnnnnnnnnnnnnnnnnnnnnnnnnnnnnnnnnnnnnnnnnnnnnnnnnnnnnnnnnnnnnnnnnnnnnnnnnnnnnnnnnnnnnnnnnnnnnnnnnnnnnnnnnnnnnnnnnnnnnnnnnnnnnnnnnnnnnnnnnnnnnnnnnnnnnnnnnnnnnnnnnnnnnnnnnnnnnnnnnnnnnnnnnnnnnnnnnnnnnnnnnnnnnnnnnnnnnnnnnnnnnnnnnnnnnnnnnnnnnnnnnnnnnnnnnnnnnnnnnnnnnnnnnnnnnnnnnnnnnnnnnnnnnnnnnnnnnnnnnnnnnnnnnnnnnnnnnnnnnnnnnnnnnnnnnnnnnnnnnnnnnnnnnnnnnnnnnnnnnnnnnnnnnnnnnnnnnnnnnnnnnnnnnnnnnnnnnnnnnnnnnnnnnnnnnnnnnnnnnnnnnnnnnnnnnnnnnnnnnnnnnnnnnnnnnnnnnnnnnnnnnnnnnnnnnnnnnnnnnnnnnnnnnnnnnnnnnnnnnnnnnnnnnnnnnnnnnnnnnnnnnnnnnnnnnnnnnnnnnnnnnnnnnnnnnnnnnnnnnnnnnnnnnnnnnnnnnnnnnnnnnnnnnnnnnnnnnnnnnnnnnnnnnnnnnnnnnnnnnnnnnnnnnnnnnnnnnnnnnnnnnnnnnnnnnnnnnnnnnnnnnnnnnnnnnnnnnnnnnnnnnnnnnnnnnnnnnnnnnnnnnnnnnnnnnnnnnnnnnnnnnnnnnnnnnnnnnnnnnnnnnnnnnnnnnnnnnnnnnnnnnnnnnnnnnnnnnnnnnnnnnnnnnnnnnnnnnnnnnnnnnnnnnnnnnnnnnnnnnnnnnnnnnnnnnnnnnnnnnnnnnnnnnnnnnnnnnnnnnnnnnnnnnnnnnnnnnnnnnnnnnnnnnnnnnnnnnnnnnnnnnnnnnnnnnnnnnnnnnnnnnnnnnnnnnnnnnnnnnnnnnnnnnnnnnnnnnnnnnnnnnnnnnnnnnnnnnnnnnnnnnnnnnnnnnnnnnnnnnnnnnnnnnnnnnnnnnnnnnnnnnnnnnnnnnnnnnnnnnnnnnnnnnnnnnnnnnnnnnnnnnnnnnnnnnnnnnnnnnnnnnnnnnnnnnnnnnnnnnnnnnnnnnnnnnnnnnnnnnnnnnnnnnnnnnnnnnnnnnnnnnnnnnnnnnnnnnnnnnnnnnnnnnnnnnnnnnnnnnnnnnnnnnnnnnnnnnnnnnnnnnnnnnnnnnnnnnnnnnnnnnnnnnnnnnnnnnnnnnnnnnnnnnnnnnnnnnnnnnnnnnnnnnnnnnnnnnnnnnnnnnnnnnnnnnnnnnnnnnnnnnnnnnnnnnnnnnnnnnnnnnnnnnnnnnnnnnnnnnnnnnnnnnnnnnnnnnnnnnnnnnnnnnnnnnnnnnnnnnnnnnnnnnnnnnnnnnnnnnnnnnnnnnnnnnnnnnnnnnnnnnnnnnnnnnnnnnnnnnnnnnnnnnnnnnnnnnnnnnnnnnnnnnnnnnnnnnnnnnnnnnnnnnnnnnnnnnnnnnnnnnnnnnnnnnnnnnnnnnnnnnnnnnnnnnnnnnnnnnnnnnnnnnnnnnnnnnnnnnnnnnnnnnnnnnnnnnnnnnnnnnnnnnnnnnnnnnnnnnnnnnnnnnnnnnnnnnnnnnnnnnnnnnnnnnnnnnnnnnnnnnnnnnnnnnnnnnnnnnnnnnnnnnnnnnnnnnnnnnnnnnnnnnnnnnnnnnnnnnnnnnnnnnnnnnnnnnnnnnnnnnnnnnnnnnnnnnnnnnnnnnnnnnnnnnnnnnnnnnnnnnnnnnnnnnnnnnnnnnnnnnnnnnnnnnnnnnnnnnnnnnnnnnnnnnnnnnnnnnnnnnnnnnnnnnnnnnnnnnnnnnnnnnnnnnnnnnnnnnnnnnnnnnnnnnnnnnnnnnnnnnnnnnnnnnnnnnnnnnnnnnnnnnnnnnnnnnnnnnnnnnnnnnnnnnnnnnnnnnnnnnnnnnnnnnnnnnnnnnnnnnnnnnnnnnnnnnnnnnnnnnnnnnnnnnnnnnnnnnnnnnnnnnnnnnnnnnnnnnnnnnnnnnnnnnnnnnnnnnnnnnnnnnnnnnnnnnnnnnnnnnnnnnnnnnnnnnnnnnnnnnnnnnnnnnnnnnnnnnnnnnnnnnnnnnnnnnnnnnnnnnnnnnnnnnnnnnnnnnnnnnnnnnnnnnnnnnnnnnnnnnnnnnnnnnnnnnnnnnnnnnnnnnnnnnnnnnnnnnnnnnnnnnnnnnnnnnnnnnnnnnnnnnnnnnnnnnnnnnnnnnnnnnnnnnnnnnnnnnnnnnnnnnnnnnnnnnnnnnnnnnnnnnnnnnnnnnnnnnnnnnnnnnnnnnnnnnnnnnnnnnnnnnnnnnnnnnnnnnnnnnnnnnnnnnnnnnnnnnnnnnnnnnnnnnnnnnnnnnnnnnnnnnnnnnnnnnnnnnnnnnnnnnnnnnnnnnnnnnnnnnnnnnnnnnnnnnnnnnnnnnnnnnnnnnnnnnnnnnnnnnnnnnnnnnnnnnnnnnnnnnnnnnnnnnnnnnnnnnnnnnnnnnnnnnnnnnnnnnnnnnnnnnnnnnnnnnnnnnnnnnnnnnnnnnnnnnnnnnnnnnnnnnnnnnnnnnnnnnnnnnnnnnnnnnnnnnnnnnnnnnnnnnnnnnnnnnnnnnnnnnnnnnnnnnnnnnnnnnnnnnnnnnnnnnnnnnnnnnnnnnnnnnnnnnnnnnnnnnnnnnnnnnnnnnnnnnnnnnnnnnnnnnnnnnnnnnnnnnnnnnnnnnnnnnnnnnnnnnnnnnnnnnnnnnnnnnnnnnnnnnnnnnnnnnnnnnnnnnnnnnnnnnnnnnnnnnnnnnnnnnnnnnnnnnnnnnnnnnnnnnnnnnnnnnnnnnnnnnnnnnnnnnnnnnnnnnnnnnnnnnnnnnnnnnnnnnnnnnnnnnnnnnnnnnnnnnnnnnnnnnnnnnnnnnnnnnnnnnnnnnnnnnnnnnnnnnnnnnnnnnnnnnnnnnnnnnnnnnnnnnnnnnnnnnnnnnnnnnnnnnnnnnnnnnnnnnnnnnnnnnnnnnnnnnnnnnnnnnnnnnnnnnnnnnnnnnnnnnnnnnnnnnnnnnnnnnnnnnnnnnnnnnnnnnnnnnnnnnnnnnnnnnnnnnnnnnnnnnnnnnnnnnnnnnnnnnnnnnnnnnnnnnnnnnnnnnnnnnnnnnnnnnnnnnnnnnnnnnnnnnnnnnnnnnnnnnnnnnnnnnnnnnnnnnnnnnnnnnnnnnnnnnnnnnnnnnnnnnnnnnnnnnnnnnnnnnnnnnnnnnnnnnnnnnnnnnnnnnnnnnnnnnnnnnnnnnnnnnnnnnnnnnnnnnnnnnnnnnnnnnnnnnnnnnnnnnnnnnnnnnnnnnnnnnnnnnnnnnnnnnnnnnnnnnnnnnnnnnnnnnnnnnnnnnnnnnnnnnnnnnnnnnnnnnnnnnnnnnnnnnnnnnnnnnnnnnnnnnnnnnnnnnnnnnnnnnnnnnnnnnnnnnnnnnnnnnnnnnnnnnnnnnnnnnnnnnnnnnnnnnnnnnnnnnnnnnnnnnnnnnnnnnnnnnnnnnnnnnnnnnnnnnnnnnnnnnnnnnnnnnnnnnnnnnnnnnnnnnnnnnnnnnnnnnnnnnnnnnnnnnnnnnnnnnnnnnnnnnnnnnnnnnnnnnnnnnnnnnnnnnnnnnnnnnnnnnnnnnnnnnnnnnnnnnnnnnnnnnnnnnnnnnnnnnnnnnnnnnnnnnnnnnnnnnnnnnnnnnnnnnnnnnnnnnnnnnnnnnnnnnnnnnnnnnnnnnnnnnnnnnnnnnnnnnnnnnnnnnnnnnnnnnnnnnnnnnnnnnnnnnnnnnnnnnnnnnnnnnnnnnnnnnnnnnnnnnnnnnnnnnnnnnnnnnnnnnnnnnnnnnnnnnnnnnnnnnnnnnnnnnnnnnnnnnnnnnnnnnnnnnnnnnnnnnnnnnnnnnnnnnnnnnnnnnnnnnnnnnnnnnnnnnnnnnnnnnnnnnnnnnnnnnnnnnnnnnnnnnnnnnnnnnnnnnnnnnnnnnnnnnnnnnnnnnnnnnnnnnnnnnnnnnnnnnnnnnnnnnnnnnnnnnnnnnnnnnnnnnnnnnnnnnnnnnnnnnnnnnnnnnnnnnnnnnnnnnnnnnnnnnnnnnnnnnnnnnnnnnnnnnnnnnnnnnnnnnnnnnnnnnnnnnnnnnnnnnnnnnnnnnnnnnnnnnnnnnnnnnnnnnnnnnnnnnnnnnnnnnnnnnnnnnnnnnnnnnnnnnnnnnnnnnnnnnnnnnnnnnnnnnnnnnnnnnnnnnnnnnnnnnnnnnnnnnnnnnnnnnnnnnnnnnnnnnnnnnnnnnnnnnnnnnnnnnnnnnnnnnnnnnnnnnnnnnnnnnnnnnnnnnnnnnnnnnnnnnnnnnnnnnnnnnnnnnnnnnnnnnnnnnnnnnnnnnnnnnnnnnnnnnnnnnnnnnnnnnnnnnnnnnnnnnnnnnnnnnnnnnnnnnnnnnnnnnnnnnnnnnnnnnnnnnnnnnnnnnnnnnnnnnnnnnnnnnnnnnnnnnnnnnnnnnnnnnnnnnnnnnnnnnnnnnnnnnnnnnnnnnnnnnnnnnnnnnnnnnnnnnnnnnnnnnnnnnnnnnnnnnnnnnnnnnnnnnnnnnnnnnnnnnnnnnnnnnnnnnnnnnnnnnnnnnnnnnnnnnnnnnnnnnnnnnnnnnnnnnnnnnnnnnnnnnnnnnnnnnnnnnnnnnnnnnnnnnnnnnnnnnnnnnnnnnnnnnnnnnnnnnnnnnnnnnnnnnnnnnnnnnnnnnnnnnnnnnnnnnnnnnnnnnnnnnnnnnnnnnnnnnnnnnnnnnnnnnnnnnnnnnnnnnnnnnnnnnnnnnnnnnnnnnnnnnnnnnnnnnnnnnnnnnnnnnnnnnnnnnnnnnnnnnnnnnnnnnnnnnnnnnnnnnnnnnnnnnnnnnnnnnnnnnnnnnnnnnnnnnnnnnnnnnnnnnnnnnnnnnnnnnnnnnnnnnnnnnnnnnnnnnnnnnnnnnnnnnnnnnnnnnnnnnnnnnnnnnnnnnnnnnnnnnnnnnnnnnnnnnnnnnnnnnnnnnnnnnnnnnnnnnnnnnnnnnnnnnnnnnnnnnnnnnnnnnnnnnnnnnnnnnnnnnnnnnnnnnnnnnnnnnnnnnnnnnnnnnnnnnnnnnnnnnnnnnnnnnnnnnnnnnnnnnnnnnnnnnnnnnnnnnnnnnnnnnnnnnnnnnnnnnnnnnnnnnnnnnnnnnnnnnnnnnnnnnnnnnnnnnnnnnnnnnnnnnnnnnnnnnnnnnnnnnnnnnnnnnnnnnnnnnnnnnnnnnnnnnnnnnnnnnnnnnnnnnnnnnnnnnnnnnnnnnnnnnnnnnnnnnnnnnnnnnnnnnnnnnnnnnnnnnnnnnnnnnnnnnnnnnnnnnnnnnnnnnnnnnnnnnnnnnnnnnnnnnnnnnnnnnnnnnnnnnnnnnnnnnnnnnnnnnnnnnnnnnnnnnnnnnnnnnnnnnnnnnnnnnnnnnnnnnnnnnnnnnnnnnnnnnnnnnnnnnnnnnnnnnnnnnnnnnnnnnnnnnnnnnnnnnnnnnnnnnnnnnnnnnnnnnnnnnnnnnnnnnnnnnnnnnnnnnnnnnnnnnnnnnnnnnnnnnnnnnnnnnnnnnnnnnnnnnnnnnnnnnnnnnnnnnnnnnnnnnnnnnnnnnnnnnnnnnnnnnnnnnnnnnnnnnnnnnnnnnnnnnnnnnnnnnnnnnnnnnnnnnnnnnnnnnnnnnnnnnnnnnnnnnnnnnnnnnnnnnnnnnnnnnnnnnnnnnnnnnnnnnnnnnnnnnnnnnnnnnnnnnnnnnnnnnnnnnnnnnnnnnnnnnnnnnnnnnnnnnnnnnnnnnnnnnnnnnnnnnnnnnnnnnnnnnnnnnnnnnnnnnnnnnnnnnnnnnnnnnnnnnnnnnnnnnnnnnnnnnnnnnnnnnnnnnnnnnnnnnnnnnnnnnnnnnnnnnnnnnnnnnnnnnnnnnnnnnnnnnnnnnnnnnnnnnnnnnnnnnnnnnnnnnnnnnnnnnnnnnnnnnnnnnnnnnnnnnnnnnnnnnnnnnnnnnnnnnnnnnnnnnnnnnnnnnnnnnnnnnnnnnnnnnnnnnnnnnnnnnnnnnnnnnnnnnnnnnnnnnnnnnnnnnnnnnnnnnnnnnnnnnnnnnnnnnnnnnnnnnnnnnnnnnnnnnnnnnnnnnnnnnnnnnnnnnnnnnnnnnnnnnnnnnnnnnnnnnnnnnnnnnnnnnnnnnnnnnnnnnnnnnnnnnnnnnnnnnnnnnnnnnnnnnnnnnnnnnnnnnnnnnnnnnnnnnnnnnnnnnnnnnnnnnnnnnnnnnnnnnnnnnnnnnnnnnnnnnnnnnnnnnnnnnnnnnnnnnnnnnnnnnnnnnnnnnnnnnnnnnnnnnnnnnnnnnnnnnnnnnnnnnnnnnnnnnnnnnnnnnnnnnnnnnnnnnnnnnnnnnnnnnnnnnnnnnnnnnnnnnnnnnnnnnnnnnnnnnnnnnnnnnnnnnnnnnnnnnnnnnnnnnnnnnnnnnnnnnnnnnnnnnnnnnnnnnnnnnnnnnnnnnnnnnnnnnnnnnnnnnnnnnnnnnnnnnnnnnnnnnnnnnnnnnnnnnnnnnnnnnnnnnnnnnnnnnnnnnnnnnnnnnnnnnnnnnnnnnnnnnnnnnnnnnnnnnnnnnnnnnnnnnnnnnnnnnnnnnnnnnnnnnnnnnnnnnnnnnnnnnnnnnnnnnnnnnnnnnnnnnnnnnnnnnnnnnnnnnnnnnnnnnnnnnnnnnnnnnnnnnnnnnnnnnnnnnnnnnnnnnnnnnnnnnnnnnnnnnnnnnnnnnnnnnnnnnnnnnnnnnnnnnnnnnnnnnnnnnnnnnnnnnnnnnnnnnnnnnnnnnnnnnnnnnnnnnnnnnnnnnnnnnnnnnnnnnnnnnnnnnnnnnnnnnnnnnnnnnnnnnnnnnnnnnnnnnnnnnnnnnnnnnnnnnnnnnnnnnnnnnnnnnnnnnnnnnnnnnnnnnnnnnnnnnnnnnnnnnnnnnnnnnnnnnnnnnnnnnnnnnnnnnnnnnnnnnnnnnnnnnnnnnnnnnnnnnnnnnnnnnnnnnnnnnnnnnnnnnnnnnnnnnnnnnnnnnnnnnnnnnnnnnnnnnnnnnnnnnnnnnnnnnnnnnnnnnnnnnnnnnnnnnnnnnnnnnnnnnnnnnnnnnnnnnnnnnnnnnnnnnnnnnnnnnnnnnnnnnnnnnnnnnnnnnnnnnnnnnnnnnnnnnnnnnnnnnnnnnnnnnnnnnnnnnnnnnnnnnnnnnnnnnnnnnnnnnnnnnnnnnnnnnnnnnnnnnnnnnnnnnnnnnnnnnnnnnnnnnnnnnnnnnnnnnnnnnnnnnnnnnnnnnnnnnnnnnnnnnnnnnnnnnnnnnnnnnnnnnnnnnnnnnnnnnnnnnnnnnnnnnnnnnnnnnnnnnnnnnnnnnnnnnnnnnnnnnnnnnnnnnnnnnnnnnnnnnnnnnnnnnnnnnnnnnnnnnnnnnnnnnnnnnnnnnnnnnnnnnnnnnnnnnnnnnnnnnnnnnnnnnnnnnnnnnnnnnnnnnnnnnnnnnnnnnnnnnnnnnnnnnnnnnnnnnnnnnnnnnnnnnnnnnnnnnnnnnnnnnnnnnnnnnnnnnnnnnnnnnnnnnnnnnnnnnnnnnnnnnnnnnnnnnnnnnnnnnnnnnnnnnnnnnnnnnnnnnnnnnnnnnnnnnnnnnnnnnnnnnnnnnnnnnnnnnnnnnnnnnnnnnnnnnnnnnnnnnnnnnnnnnnnnnnnnnnnnnnnnnnnnnnnnnnnnnnnnnnnnnnnnnnnnnnnnnnnnnnnnnnnnnnnnnnnnnnnnnnnnnnnnnnnnnnnnnnnnnnnnnnnnnnnnnnnnnnnnnnnnnnnnnnnnnnnnnnnnnnnnnnnnnnnnnnnnnnnnnnnnnnnnnnnnnnnnnnnnnnnnnnnnnnnnnnnnnnnnnnnnnnnnnnnnnnnnnnnnnnnnnnnnnnnnnnnnnnnnnnnnnnnnnnnnnnnnnnnnnnnnnnnnnnnnnnnnnnnnnnnnnnnnnnnnnnnnnnnnnnnnnnnnnnnnnnnnnnnnnnnnnnnnnnnnnnnnnnnnnnnnnnnnnnnnnnnnnnnnnnnnnnnnnnnnnnnnnnnnnnnnnnnnnnnnnnnnnnnnnnnnnnnnnnnnnnnnnnnnnnnnnnnnnnnnnnnnnnnnnnnnnnnnnnnnnnnnnnnnnnnnnnnnnnnnnnnnnnnnnnnnnnnnnnnnnnnnnnnnnnnnnnnnnnnnnnnnnnnnnnnnnnnnnnnnnnnnnnnnnnnnnnnnnnnnnnnnnnnnnnnnnnnnnnnnnnnnnnnnnnnnnnnnnnnnnnnnnnnnnnnnnnnnnnnnnnnnnnnnnnnnnnnnnnnnnnnnnnnnnnnnnnnnnnnnnnnnnnnnnnnnnnnnnnnnnnnnnnnnnnnnnnnnnnnnnnnnnnnnnnnnnnnnnnnnnnnnnnnnnnnnnnnnnnnnnnnnnnnnnnnnnnnnnnnnnnnnnnnnnnnnnnnnnnnnnnnnnnnnnnnnnnnnnnnnnnnnnnnnnnnnnnnnnnnnnnnnnnnnnnnnnnnnnnnnnnnnnnnnnnnnnnnnnnnnnnnnnnnnnnnnnnnnnnnnnnnnnnnnnnnnnnnnnnnnnnnnnnnnnnnnnnnnnnnnnnnnnnnnnnnnnnnnnnnnnnnnnnnnnnnnnnnnnnnnnnnnnnnnnnnnnnnnnnnnnnnnnnnnnnnnnnnnnnnnnnnnnnnnnnnnnnnnnnnnnnnnnnnnnnnnnnnnnnnnnnnnnnnnnnnnnnnnnnnnnnnnnnnnnnnnnnnnnnnnnnnnnnnnnnnnnnnnnnnnnnnnnnnnnnnnnnnnnnnnnnnnnnnnnnnnnnnnnnnnnnnnnnnnnnnnnnnnnnnnnnnnnnnnnnnnnnnnnnnnnnnnnnnnnnnnnnnnnnnnnnnnnnnnnnnnnnnnnnnnnnnnnnnnnnnnnnnnnnnnnnnnnnnnnnnnnnnnnnnnnnnnnnnnnnnnnnnnnnnnnnnnnnnnnnnnnnnnnnnnnnnnnnnnnnnnnnnnnnnnnnnnnnnnnnnnnnnnnnnnnnnnnnnnnnnnnnnnnnnnnnnnnnnnnnnnnnnnnnnnnnnnnnnnnnnnnnnnnnnnnnnnnnnnnnnnnnnnnnnnnnnnnnnnnnnnnnnnnnnnnnnnnnnnnnnnnnnnnnnnnnnnnnnnnnnnnnnnnnnnnnnnnnnnnnnnnnnnnnnnnnnnnnnnnnnnnnnnnnnnnnnnnnnnnnnnnnnnnnnnnnnnnnnnnnnnnnnnnnnnnnnnnnnnnnnnnnnnnnnnnnnnnnnnnnnnnnnnnnnnnnnnnnnnnnnnnnnnnnnnnnnnnnnnnnnnnnnnnnnnnnnnnnnnnnnnnnnnnnnnnnnnnnnnnnnnnnnnnnnnnnnnnnnnnnnnnnnnnnnnnnnnnnnnnnnnnnnnnnnnnnnnnnnnnnnnnnnnnnnnnnnnnnnnnnnnnnnnnnnnnnnnnnnnnnnnnnnnnnnnnnnnnnnnnnnnnnnnnnnnnnnnnnnnnnnnnnnnnnnnnnnnnnnnnnnnnnnnnnnnnnnnnnnnnnnnnnnnnnnnnnnnnnnnnnnnnnnnnnnnnnnnnnnnnnnnnnnnnnnnnnnnnnnnnnnnnnnnnnnnnnnnnnnnnnnnnnnnnnnnnnnnnnnnnnnnnnnnnnnnnnnnnnnnnnnnnnnnnnnnnnnnnnnnnnnnnnnnnnnnnnnnnnnnnnnnnnnnnnnnnnnnnnnnnnnnnnnnnnnnnnnnnnnnnnnnnnnnnnnnnnnnnnnnnnnnnnnnnnnnnnnnnnnnnnnnnnnnnnnnnnnnnnnnnnnnnnnnnnnnnnnnnnnnnnnnnnnnnnnnnnnnnnnnnnnnnnnnnnnnnnnnnnnnnnnnnnnnnnnnnnnnnnnnnnnnnnnnnnnnnnnnnnnnnnnnnnnnnnnnnnnnnnnnnnnnnnnnnnnnnnnnnnnnnnnnnnnnnnnnnnnnnnnnnnnnnnnnnnnnnnnnnnnnnnnnnnnnnnnnnnnnnnnnnnnnnnnnnnnnnnnnnnnnnnnnnnnnnnnnnnnnnnnnnnnnnnnnnnnnnnnnnnnnnnnnnnnnnnnnnnnnnnnnnnnnnnnnnnnnnnnnnnnnnnnnnnnnnnnnnnnnnnnnnnnnnnnnnnnnnnnnnnnnnnnnnnnnnnnnnnnnnnnnnnnnnnnnnnnnnnnnnnnnnnnnnnnnnnnnnnnnnnnnnnnnnnnnnnnnnnnnnnnnnnnnnnnnnnnnnnnnnnnnnnnnnnnnnnnnnnnnnnnnnnnnnnnnnnnnnnnnnnnnnnnnnnnnnnnnnnnnnnnnnnnnnnnnnnnnnnnnnnnnnnnnnnnnnnnnnnnnnnnnnnnnnnnnnnnnnnnnnnnnnnnnnnnnnnnnnnnnnnnnnnnnnnnnnnnnnnnnnnnnnnnnnnnnnnnnnnnnnnnnnnnnnnnnnnnnnnnnnnnnnnnnnnnnnnnnnnnnnnnnnnnnnnnnnnnnnnnnnnnnnnnnnnnnnnnnnnnnnnnnnnnnnnnnnnnnnnnnnnnnnnnnnnnnnnnnnnnnnnnnnnnnnnnnnnnnnnnnnnnnnnnnnnnnnnnnnnnnnnnnnnnnnnnnnnnnnnnnnnnnnnnnnnnnnnnnnnnnnnnnnnnnnnnnnnnnnnnnnnnnnnnnnnnnnnnnnnnnnnnnnnnnnnnnnnnnnnnnnnnnnnnnnnnnnnnnnnnnnnnnnnnnnnnnnnnnnnnnnnnnnnnnnnnnnnnnnnnnnnnnnnnnnnnnnnnnnnnnnnnnnnnnnnnnnnnnnnnnnnnnnnnnnnnnnnnnnnnnnnnnnnnnnnnnnnnnnnnnnnnnnnnnnnnnnnnnnnnnnnnnnnnnnnnnnnnnnnnnnnnnnnnnnnnnnnnnnnnnnnnnnnnnnnnnnnnnnnnnnnnnnnnnnnnnnnnnnnnnnnnnnnnnnnnnnnnnnnnnnnnnnnnnnnnnnnnnnnnnnnnnnnnnnnnnnnnnnnnnnnnnnnnnnnnnnnnnnnnnnnnnnnnnnnnnnnnnnnnnnnnnnnnnnnnnnnnnnnnnnnnnnnnnnnnnnnnnnnnnnnnnnnnnnnnnnnnnnnnnnnnnnnnnnnnnnnnnnnnnnnnnnnnnnnnnnnnnnnnnnnnnnnnnnnnnnnnnnnnnnnnnnnnnnnnnnnnnnnnnnnnnnnnnnnnnnnnnnnnnnnnnnnnnnnnnnnnnnnnnnnnnnnnnnnnnnnnnnnnnnnnnnnnnnnnnnnnnnnnnnnnnnnnnnnnnnnnnnnnnnnnnnnnnnnnnnnnnnnnnnnnnnnnnnnnnnnnnnnnnnnnnnnnnnnnnnnnnnnnnnnnnnnnnnnnnnnnnnnnnnnnnnnnnnnnnnnnnnnnnnnnnnnnnnnnnnnnnnnnnnnnnnnnnnnnnnnnnnnnnnnnnnnnnnnnnnnnnnnnnnnnnnnnnnnnnnnnnnnnnnnnnnnnnnnnnnnnnnnnnnnnnnnnnnnnnnnnnnnnnnnnnnnnnnnnnnnnnnnnnnnnnnnnnnnnnnnnnnnnnnnnnnnnnnnnnnnnnnnnnnnnnnnnnnnnnnnnnnnnnnnnnnnnnnnnnnnnnnnnnnnnnnnnnnnnnnnnnnnnnnnnnnnnnnnnnnnnnnnnnnnnnnnnnnnnnnnnnnnnnnnnnnnnnnnnnnnnnnnnnnnnnnnnnnnnnnnnnnnnnnnnnnnnnnnnnnnnnnnnnnnnnnnnnnnnnnnnnnnnnnnnnnnnnnnnnnnnnnnnnnnnnnnnnnnnnnnnnnnnnnnnnnnnnnnnnnnnnnnnnnnnnnnnnnnnnnnnnnnnnnnnnnnnnnnnnnnnnnnnnnnnnnnnnnnnnnnnnnnnnnnnnnnnnnnnnnnnnnnnnnnnnnnnnnnnnnnnnnnnnnnnnnnnnnnnnnnnnnnnnnnnnnnnnnnnnnnnnnnnnnnnnnnnnnnnnnnnnnnnnnnnnnnnnnnnnnnnnnnnnnnnnnnnnnnnnnnnnnnnnnnnnnnnnnnnnnnnnnnnnnnnnnnnnnnnnnnnnnnnnnnnnnnnnnnnnnnnnnnnnnnnnnnnnnnnnnnnnnnnnnnnnnnnnnnnnnnnnnnnnnnnnnnnnnnnnnnnnnnnnnnnnnnnnnnnnnnnnnnnnnnnnnnnnnnnnnnnnnnnnnnnnnnnnnnnnnnnnnnnnnnnnnnnnnnnnnnnnnnnnnnnnnnnnnnnnnnnnnnnnnnnnnnnnnnnnnnnnnnnnnnnnnnnnnnnnnnnnnnnnnnnnnnnnnnnnnnnnnnnnnnnnnnnnnnnnnnnnnnnnnnnnnnnnnnnnnnnnnnnnnnnnnnnnnnnnnnnnnnnnnnnnnnnnnnnnnnnnnnnnnnnnnnnnnnnnnnnnnnnnnnnnnnnnnnnnnnnnnnnnnnnnnnnnnnnnnnnnnnnnnnnnnnnnnnnnnnnnnnnnnnnnnnnnnnnnnnnnnnnnnnnnnnnnnnnnnnnnnnnnnnnnnnnnnnnnnnnnnnnnnnnnnnnnnnnnnnnnnnnnnnnnnnnnnnnnnnnnnnnnnnnnnnnnnnnnnnnnnnnnnnnnnnnnnnnnnnnnnnnnnnnnnnnnnnnnnnnnnnnnnnnnnnnnnnnnnnnnnnnnnnnnnnnnnnnnnnnnnnnnnnnnnnnnnnnnnnnnnnnnnnnnnnnnnnnnnnnnnnnnnnnnnnnnnnnnnnnnnnnnnnnnnnnnnnnnnnnnnnnnnnnnnnnnnnnnnnnnnnnnnnnnnnnnnnnnnnnnnnnnnnnnnnnnnnnnnnnnnnnnnnnnnnnnnnnnnnnnnnnnnnnnnnnnnnnnnnnnnnnnnnnnnnnnnnnnnnnnnnnnnnnnnnnnnnnnnnnnnnnnnnnnnnnnnnnnnnnnnnnnnnnnnnnnnnnnnnnnnnnnnnnnnnnnnnnnnnnnnnnnnnnnnnnnnnnnnnnnnnnnnnnnnnnnnnnnnnnnnnnnnnnnnnnnnnnnnnnnnnnnnnnnnnnnnnnnnnnnnnnnnnnnnnnnnnnnnnnnnnnnnnnnnnnnnnnnnnnnnnnnnnnnnnnnnnnnnnnnnnnnnnnnnnnnnnnnnnnnnnnnnnnnnnnnnnnnnnnnnnnnnnnnnnnnnnnnnnnnnnnnnnnnnnnnnnnnnnnnnnnnnnnnnnnnnnnnnnnnnnnnnnnnnnnnnnnnnnnnnnnnnnnnnnnnnnnnnnnnnnnnnnnnnnnnnnnnnnnnnnnnnnnnnnnnnnnnnnnnnnnnnnnnnnnnnnnnnnnnnnnnnnnnnnnnnnnnnnnnnnnnnnnnnnnnnnnnnnnnnnnnnnnnnnnnnnnnnnnnnnnnnnnnnnnnnnnnnnnnnnnnnnnnnnnnnnnnnnnnnnnnnnnnnnnnnnnnnnnnnnnnnnnnnnnnnnnnnnnnnnnnnnnnnnnnnnnnnnnnnnnnnnnnnnnnnnnnnnnnnnnnnnnnnnnnnnnnnnnnnnnnnnnnnnnnnnnnnnnnnnnnnnnnnnnnnnnnnnnnnnnnnnnnnnnnnnnnnnnnnnnnnnnnnnnnnnnnnnnnnnnnnnnnnnnnnnnnnnnnnnnnnnnnnnnnnnnnnnnnnnnnnnnnnnnnnnnnnnnnnnnnnnnnnnnnnnnnnnnnnnnnnnnnnnnnnnnnnnnnnnnnnnnnnnnnnnnnnnnnnnnnnnnnnnnnnnnnnnnnnnnnnnnnnnnnnnnnnnnnnnnnnnnnnnnnnnnnnnnnnnnnnnnnnnnnnnnnnnnnnnnnnnnnnnnnnnnnnnnnnnnnnnnnnnnnnnnnnnnnnnnnnnnnnnnnnnnnnnnnnnnnnnnnnnnnnnnnnnnnnnnnnnnnnnnnnnnnnnnnnnnnnnnnnnnnnnnnnnnnnnnnnnnnnnnnnnnnnnnnnnnnnnnnnnnnnnnnnnnnnnnnnnnnnnnnnnnnnnnnnnnnnnnnnnnnnnnnnnnnnnnnnnnnnnnnnnnnnnnnnnnnnnnnnnnnnnnnnnnnnnnnnnnnnnnnnnnnnnnnnnnnnnnnnnnnnnnnnnnnnnnnnnnnnnnnnnnnnnnnnnnnnnnnnnnnnnnnnnnnnnnnnnnnnnnnnnnnnnnnnnnnnnnnnnnnnnnnnnnnnnnnnnnnnnnnnnnnnnnnnnnnnnnnnnnnnnnnnnnnnnnnnnnnnnnnnnnnnnnnnnnnnnnnnnnnnnnnnnnnnnnnnnnnnnnnnnnnnnnnnnnnnnnnnnnnnnnnnnnnnnnnnnnnnnnnnnnnnnnnnnnnnnnnnnnnnnnnnnnnnnnnnnnnnnnnnnnnnnnnnnnnnnnnnnnnnnnnnnnnnnnnnnnnnnnnnnnnnnnnnnnnnnnnnnnnnnnnnnnnnnnnnnnnnnnnnnnnnnnnnnnnnnnnnnnnnnnnnnnnnnnnnnnnnnnnnnnnnnnnnnnnnnnnnnnnnnnnnnnnnnnnnnnnnnnnnnnnnnnnnnnnnnnnnnnnnnnnnnnnnnnnnnnnnnnnnnnnnnnnnnnnnnnnnnnnnnnnnnnnnnnnnnnnnnnnnnnnnnnnnnnnnnnnnnnnnnnnnnnnnnnnnnnnnnnnnnnnnnnnnnnnnnnnnnnnnnnnnnnnnnnnnnnnnnnnnnnnnnnnnnnnnnnnnnnnnnnnnnnnnnnnnnnnnnnnnnnnnnnnnnnnnnnnnnnnnnnnnnnnnnnnnnnnnnnnnnnnnnnnnnnnnnnnnnnnnnnnnnnnnnnnnnnnnnnnnnnnnnnnnnnnnnnnnnnnnnnnnnnnnnnnnnnnnnnnnnnnnnnnnnnnnnnnnnnnnnnnnnnnnnnnnnnnnnnnnnnnnnnnnnnnnnnnnnnnnnnnnnnnnnnnnnnnnnnnnnnnnnnnnnnnnnnnnnnnnnnnnnnnnnnnnnnnnnnnnnnnnnnnnnnnnnnnnnnnnnnnnnnnnnnnnnnnnnnnnnnnnnnnnnnnnnnnnnnnnnnnnnnnnnnnnnnnnnnnnnnnnnnnnnnnnnnnnnnnnnnnnnnnnnnnnnnnnnnnnnnnnnnnnnnnnnnnnnnnnnnnnnnnnnnnnnnnnnnnnnnnnnnnnnnnnnnnnnnnnnnnnnnnnnnnnnnnnnnnnnnnnnnnnnnnnnnnnnnnnnnnnnnnnnnnnnnnnnnnnnnnnnnnnnnnnnnnnnnnnnnnnnnnnnnnnnnnnnnnnnnnnnnnnnnnnnnnnnnnnnnnnnnnnnnnnnnnnnnnnnnnnnnnnnnnnnnnnnnnnnnnnnnnnnnnnnnnnnnnnnnnnnnnnnnnnnnnnnnnnnnnnnnnnnnnnnnnnnnnnnnnnnnnnnnnnnnnnnnnnnnnnnnnnnnnnnnnnnnnnnnnnnnnnnnnnnnnnnnnnnnnnnnnnnnnnnnnnnnnnnnnnnnnnnnnnnnnnnnnnnnnnnnnnnnnnnnnnnnnnnnnnnnnnnnnnnnnnnnnnnnnnnnnnnnnnnnnnnnnnnnnnnnnnnnnnnnnnnnnnnnnnnnnnnnnnnnnnnnnnnnnnnnnnnnnnnnnnnnnnnnnnnnnnnnnnnnnnnnnnnnnnnnnnnnnnnnnnnnnnnnnnnnnnnnnnnnnnnnnnnnnnnnnnnnnnnnnnnnnnnnnnnnnnnnnnnnnnnnnnnnnnnnnnnnnnnnnnnnnnnnnnnnnnnnnnnnnnnnnnnnnnnnnnnnnnnnnnnnnnnnnnnnnnnnnnnnnnnnnnnnnnnnnnnnnnnnnnnnnnnnnnnnnnnnnnnnnnnnnnnnnnnnnnnnnnnnnnnnnnnnnnnnnnnnnnnnnnnnnnnnnnnnnnnnnnnnnnnnnnnnnnnnnnnnnnnnnnnnnnnnnnnnnnnnnnnnnnnnnnnnnnnnnnnnnnnnnnnnnnnnnnnnnnnnnnnnnnnnnnnnnnnnnnnnnnnnnnnnnnnnnnnnnnnnnnnnnnnnnnnnnnnnnnnnnnnnnnnnnnnnnnnnnnnnnnnnnnnnnnnnnnnnnnnnnnnnnnnnnnnnnnnnnnnnnnnnnnnnnnnnnnnnnnnnnnnnnnnnnnnnnnnnnnnnnnnnnnnnnnnnnnnnnnnnnnnnnnnnnnnnnnnnnnnnnnnnnnnnnnnnnnnnnnnnnnnnnnnnnnnnnnnnnnnnnnnnnnnnnnnnnnnnnnnnnnnnnnnnnnnnnnnnnnnnnnnnnnnnnnnnnnnnnnnnnnnnnnnnnnnnnnnnnnnnnnnnnnnnnnnnnnnnnnnnnnnnnnnnnnnnnnnnnnnnnnnnnnnnnnnnnnnnnnnnnnnnnnnnnnnnnnnnnnnnnnnnnnnnnnnnnnnnnnnnnnnnnnnnnnnnnnnnnnnnnnnnnnnnnnnnnnnnnnnnnnnnnnnnnnnnnnnnnnnnnnnnnnnnnnnnnnnnnnnnnnnnnnnnnnnnnnnnnnnnnnnnnnnnnnnnnnnnnnnnnnnnnnnnnnnnnnnnnnnnnnnnnnnnnnnnnnnnnnnnnnnnnnnnnnnnnnnnnnnnnnnnnnnnnnnnnnnnnnnnnnnnnnnnnnnnnnnnnnnnnnnnnnnnnnnnnnnnnnnnnnnnnnnnnnnnnnnnnnnnnnnnnnnnnnnnnnnnnnnnnnnnnnnnnnnnnnnnnnnnnnnnnnnnnnnnnnnnnnnnnnnnnnnnnnnnnnnnnnnnnnnnnnnnnnnnnnnnnnnnnnnnnnnnnnnnnnnnnnnnnnnnnnnnnnnnnnnnnnnnnnnnnnnnnnnnnnnnnnnnnnnnnnnnnnnnnnnnnnnnnnnnnnnnnnnnnnnnnnnnnnnnnnnnnnnnnnnnnnnnnnnnnnnnnnnnnnnnnnnnnnnnnnnnnnnnnnnnnnnnnnnnnnnnnnnnnnnnnnnnnnnnnnnnnnnnnnnnnnnnnnnnnnnnnnnnnnnnnnnnnnnnnnnnnnnnnnnnnnnnnnnnnnnnnnnnnnnnnnnnnnnnnnnnnnnnnnnnnnnnnnnnnnnnnnnnnnnnnnnnnnnnnnnnnnnnnnnnnnnnnnnnnnnnnnnnnnnnnnnnnnnnnnnnnnnnnnnnnnnnnnnnnnnnnnnnnnnnnnnnnnnnnnnnnnnnnnnnnnnnnnnnnnnnnnnnnnnnnnnnnnnnnnnnnnnnnnnnnnnnnnnnnnnnnnnnnnnnnnnnnnnnnnnnnnnnnnnnnnnnnnnnnnnnnnnnnnnnnnnnnnnnnnnnnnnnnnnnnnnnnnnnnnnnnnnnnnnnnnnnnnnnnnnnnnnnnnnnnnnnnnnnnnnnnnnnnnnnnnnnnnnnnnnnnnnnnnnnnnnnnnnnnnnnnnnnnnnnnnnnnnnnnnnnnnnnnnnnnnnnnnnnnnnnnnnnnnnnnnnnnnnnnnnnnnnnnnnnnnnnnnnnnnnnnnnnnnnnnnnnnnnnnnnnnnnnnnnnnnnnnnnnnnnnnnnnnnnnnnnnnnnnnnnnnnnnnnnnnnnnnnnnnnnnnnnnnnnnnnnnnnnnnnnnnnnnnnnnnnnnnnnnnnnnnnnnnnnnnnnnnnnnnnnnnnnnnnnnnnnnnnnnnnnnnnnnnnnnnnnnnnnnnnnnnnnnnnnnnnnnnnnnnnnnnnnnnnnnnnnnnnnnnnnnnnnnnnnnnnnnnnnnnnnnnnnnnnnnnnnnnnnnnnnnnnnnnnnnnnnnnnnnnnnnnnnnnnnnnnnnnnnnnnnnnnnnnnnnnnnnnnnnnnnnnnnnnnnnnnnnnnnnnnnnnnnnnnnnnnnnnnnnnnnnnnnnnnnnnnnnnnnnnnnnnnnnnnnnnnnnnnnnnnnnnnnnnnnnnnnnnnnnnnnnnnnnnnnnnnnnnnnnnnnnnnnnnnnnnnnnnnnnnnnnnnnnnnnnnnnnnnnnnnnnnnnnnnnnnnnnnnnnnnnnnnnnnnnnnnnnnnnnnnnnnnnnnnnnnnnnnnnnnnnnnnnnnnnnnnnnnnnnnnnnnnnnnnnnnnnnnnnnnnnnnnnnnnnnnnnnnnnnnnnnnnnnnnnnnnnnnnnnnnnnnnnnnnnnnnnnnnnnnnnnnnnnnnnnnnnnnnnnnnnnnnnnnnnnnnnnnnnnnnnnnnnnnnnnnnnnnnnnnnnnnnnnnnnnnnnnnnnnnnnnnnnnnnnnnnnnnnnnnnnnnnnnnnnnnnnnnnnnnnnnnnnnnnnnnnnnnnnnnnnnnnnnnnnnnnnnnnnnnnnnnnnnnnnnnnnnnnnnnnnnnnnnnnnnnnnnnnnnnnnnnnnnnnnnnnnnnnnnnnnnnnnnnnnnnnnnnnnnnnnnnnnnnnnnnnnnnnnnnnnnnnnnnnnnnnnnnnnnnnnnnnnnnnnnnnnnnnnnnnnnnnnnnnnnnnnnnnnnnnnnnnnnnnnnnnnnnnnnnnnnnnnnnnnnnnnnnnnnnnnnnnnnnnnnnnnnnnnnnnnnnnnnnnnnnnnnnnnnnnnnnnnnnnnnnnnnnnnnnnnnnnnnnnnnnnnnnnnnnnnnnnnnnnnnnnnnnnnnnnnnnnnnnnnnnnnnnnnnnnnnnnnnnnnnnnnnnnnnnnnnnnnnnnnnnnnnnnnnnnnnnnnnnnnnnnnnnnnnnnnnnnnnnnnnnnnnnnnnnnnnnnnnnnnnnnnnnnnnnnnnnnnnnnnnnnnnnnnnnnnnnnnnnnnnnnnnnnnnnnnnnnnnnnnnnnnnnnnnnnnnnnnnnnnnnnnnnnnnnnnnnnnnnnnnnnnnnnnnnnnnnnnnnnnnnnnnnnnnnnnnnnnnnnnnnnnnnnnnnnnnnnnnnnnnnnnnnnnnnnnnnnnnnnnnnnnnnnnnnnnnnnnnnnnnnnnnnnnnnnnnnnnnnnnnnnnnnnnnnnnnnnnnnnnnnnnnnnnnnnnnnnnnnnnnnnnnnnnnnnnnnnnnnnnnnnnnnnnnnnnnnnnnnnnnnnnnnnnnnnnnnnnnnnnnnnnnnnnnnnnnnnnnnnnnnnnnnnnnnnnnnnnnnnnnnnnnnnnnnnnnnnnnnnnnnnnnnnnnnnnnnnnnnnnnnnnnnnnnnnnnnnnnnnnnnnnnnnnnnnnnnnnnnnnnnnnnnnnnnnnnnnnnnnnnnnnnnnnnnnnnnnnnnnnnnnnnnnnnnnnnnnnnnnnnnnnnnnnnnnnnnnnnnnnnnnnnnnnnnnnnnnnnnnnnnnnnnnnnnnnnnnnnnnnnnnnnnnnnnnnnnnnnnnnnnnnnnnnnnnnnnnnnnnnnnnnnnnnnnnnnnnnnnnnnnnnnnnnnnnnnnnnnnnnnnnnnnnnnnnnnnnnnnnnnnnnnnnnnnnnnnnnnnnnnnnnnnnnnnnnnnnnnnnnnnnnnnnnnnnnnnnnnnnnnnnnnnnnnnnnnnnnnnnnnnnnnnnnnnnnnnnnnnnnnnnnnnnnnnnnnnnnnnnnnnnnnnnnnnnnnnnnnnnnnnnnnnnnnnnnnnnnnnnnnnnnnnnnnnnnnnnnnnnnnnnnnnnnnnnnnnnnnnnnnnnnnnnnnnnnnnnnnnnnnnnnnnnnnnnnnnnnnnnnnnnnnnnnnnnnnnnnnnnnnnnnnnnnnnnnnnnnnnnnnnnnnnnnnnnnnnnnnnnnnnnnnnnnnnnnnnnnnnnnnnnnnnnnnnnnnnnnnnnnnnnnnnnnnnnnnnnnnnnnnnnnnnnnnnnnnnnnnnnnnnnnnnnnnnnnnnnnnnnnnnnnnnnnnnnnnnnnnnnnnnnnnnnnnnnnnnnnnnnnnnnnnnnnnnnnnnnnnnnnnnnnnnnnnnnnnnnnnnnnnnnnnnnnnnnnnnnnnnnnnnnnnnnnnnnnnnnnnnnnnnnnnnnnnnnnnnnnnnnnnnnnnnnnnnnnnnnnnnnnnnnnnnnnnnnnnnnnnnnnnnnnnnnnnnnnnnnnnnnnnnnnnnnnnnnnnnnnnnnnnnnnnnnnnnnnnnnnnnnnnnnnnnnnnnnnnnnnnnnnnnnnnnnnnnnnnnnnnnnnnnnnnnnnnnnnnnnnnnnnnnnnnnnnnnnnnnnnnnnnnnnnnnnnnnnnnnnnnnnnnnnnnnnnnnnnnnnnnnnnnnnnnnnnnnnnnnnnnnnnnnnnnnnnnnnnnnnnnnnnnnnnnnnnnnnnnnnnnnnnnnnnnnnnnnnnnnnnnnnnnnnnnnnnnnnnnnnnnnnnnnnnnnnnnnnnnnnnnnnnnnnnnnnnnnnnnnnnnnnnnnnnnnnnnnnnnnnnnnnnnnnnnnnnnnnnnnnnnnnnnnnnnnnnnnnnnnnnnnnnnnnnnnnnnnnnnnnnnnnnnnnnnnnnnnnnnnnnnnnnnnnnnnnnnnnnnnnnnnnnnnnnnnnnnnnnnnnnnnnnnnnnnnnnnnnnnnnnnnnnnnnnnnnnnnnnnnnnnnnnnnnnnnnnnnnnnnnnnnnnnnnnnnnnnnnnnnnnnnnnnnnnnnnnnnnnnnnnnnnnnnnnnnnnnnnnnnnnnnnnnnnnnnnnnnnnnnnnnnnnnnnnnnnnnnnnnnnnnnnnnnnnnnnnnnnnnnnnnnnnnnnnnnnnnnnnnnnnnnnnnnnnnnnnnnnnnnnnnnnnnnnnnnnnnnnnnnnnnnnnnnnnnnnnnnnnnnnnnnnnnnnnnnnnnnnnnnnnnnnnnnnnnnnnnnnnnnnnnnnnnnnnnnnnnnnnnnnnnnnnnnnnnnnnnnnnnnnnnnnnnnnnnnnnnnnnnnnnnnnnnnnnnnnnnnnnnnnnnnnnnnnnnnnnnnnnnnnnnnnnnnnnnnnnnnnnnnnnnnnnnnnnnnnnnnnnnnnnnnnnnnnnnnnnnnnnnnnnnnnnnnnnnnnnnnnnnnnnnnnnnnnnnnnnnnnnnnnnnnnnnnnnnnnnnnnnnnnnnnnnnnnnnnnnnnnnnnnnnnnnnnnnnnnnnnnnnnnnnnnnnnnnnnnnnnnnnnnnnnnnnnnnnnnnnnnnnnnnnnnnnnnnnnnnnnnnnnnnnnnnnnnnnnnnnnnnnnnnnnnnnnnnnnnnnnnnnnnnnnnnnnnnnnnnnnnnnnnnnnnnnnnnnnnnnnnnnnnnnnnnnnnnnnnnnnnnnnnnnnnnnnnnnnnnnnnnnnnnnnnnnnnnnnnnnnnnnnnnnnnnnnnnnnnnnnnnnnnnnnnnnnnnnnnnnnnnnnnnnnnnnnnnnnnnnnnnnnnnnnnnnnnnnnnnnnnnnnnnnnnnnnnnnnnnnnnnnnnnnnnnnnnnnnnnnnnnnnnnnnnnnnnnnnnnnnnnnnnnnnnnnnnnnnnnnnnnnnnnnnnnnnnnnnnnnnnnnnnnnnnnnnnnnnnnnnnnnnnnnnnnnnnnnnnnnnnnnnnnnnnnnnnnnnnnnnnnnnnnnnnnnnnnnnnnnnnnnnnnnnnnnnnnnnnnnnnnnnnnnnnnnnnnnnnnnnnnnnnnnnnnnnnnnnnnnnnnnnnnnnnnnnnnnnnnnnnnnnnnnnnnnnnnnnnnnnnnnnnnnnnnnnnnnnnnnnnnnnnnnnnnnnnnnnnnnnnnnnnnnnnnnnnnnnnnnnnnnnnnnnnnnnnnnnnnnnnnnnnnnnnnnnnnnnnnnnnnnnnnnnnnnnnnnnnnnnnnnnnnnnnnnnnnnnnnnnnnnnnnnnnnnnnnnnnnnnnnnnnnnnnnnnnnnnnnnnnnnnnnnnnnnnnnnnnnnnnnnnnnnnnnnnnnnnnnnnnnnnnnnnnnnnnnnnnnnnnnnnnnnnnnnnnnnnnnnnnnnnnnnnnnnnnnnnnnnnnnnnnnnnnnnnnnnnnnnnnnnnnnnnnnnnnnnnnnnnnnnnnnnnnnnnnnnnnnnnnnnnnnnnnnnnnnnnnnnnnnnnnnnnnnnnnnnnnnnnnnnnnnnnnnnnnnnnnnnnnnnnnnnnnnnnnnnnnnnnnnnnnnnnnnnnnnnnnnnnnnnnnnnnnnnnnnnnnnnnnnnnnnnnnnnnnnnnnnnnnnnnnnnnnnnnnnnnnnnnnnnnnnnnnnnnnnnnnnnnnnnnnnnnnnnnnnnnnnnnnnnnnnnnnnnnnnnnnnnnnnnnnnnnnnnnnnnnnnnnnnnnnnnnnnnnnnnnnnnnnnnnnnnnnnnnnnnnnnnnnnnnnnnnnnnnnnnnnnnnnnnnnnnnnnnnnnnnnnnnnnnnnnnnnnnnnnnnnnnnnnnnnnnnnnnnnnnnnnnnnnnnnnnnnnnnnnnnnnnnnnnnnnnnnnnnnnnnnnnnnnnnnnnnnnnnnnnnnnnnnnnnnnnnnnnnnnnnnnnnnnnnnnnnnnnnnnnnnnnnnnnnnnnnnnnnnnnnnnnnnnnnnnnnnnnnnnnnnnnnnnnnnnnnnnnnnnnnnnnnnnnnnnnnnnnnnnnnnnnnnnnnnnnnnnnnnnnnnnnnnnnnnnnnnnnnnnnnnnnnnnnnnnnnnnnnnnnnnnnnnnnnnnnnnnnnnnnnnnnnnnnnnnnnnnnnnnnnnnnnnnnnnnnnnnnnnnnnnnnnnnnnnnnnnnnnnnnnnnnnnnnnnnnnnnnnnnnnnnnnnnnnnnnnnnnnnnnnnnnnnnnnnnnnnnnnnnnnnnnnnnnnnnnnnnnnnnnnnnnnnnnnnnnnnnnnnnnnnnnnnnnnnnnnnnnnnnnnnnnnnnnnnnnnnnnnnnnnnnnnnnnnnnnnnnnnnnnnnnnnnnnnnnnnnnnnnnnnnnnnnnnnnnnnnnnnnnnnnnnnnnnnnnnnnnnnnnnnnnnnnnnnnnnnnnnnnnnnnnnnnnnnnnnnnnnnnnnnnnnnnnnnnnnnnnnnnnnnnnnnnnnnnnnnnnnnnnnnnnnnnnnnnnnnnnnnnnnnnnnnnnnnnnnnnnnnnnnnnnnnnnnnnnnnnnnnnnnnnnnnnnnnnnnnnnnnnnnnnnnnnnnnnnnnnnnnnnnnnnnnnnnnnnnnnnnnnnnnnnnnnnnnnnnnnnnnnnnnnnnnnnnnnnnnnnnnnnnnnnnnnnnnnnnnnnnnnnnnnnnnnnnnnnnnnnnnnnnnnnnnnnnnnnnnnnnnnnnnnnnnnnnnnnnnnnnnnnnnnnnnnnnnnnnnnnnnnnnnnnnnnnnnnnnnnnnnnnnnnnnnnnnnnnnnnnnnnnnnnnnnnnnnnnnnnnnnnnnnnnnnnnnnnnnnnnnnnnnnnnnnnnnnnnnnnnnnnnnnnnnnnnnnnnnnnnnnnnnnnnnnnnnnnnnnnnnnnnnnnnnnnnnnnnnnnnnnnnnnnnnnnnnnnnnnnnnnnnnnnnnnnnnnnnnnnnnnnnnnnnnnnnnnnnnnnnnnnnnnnnnnnnnnnnnnnnnnnnnnnnnnnnnnnnnnnnnnnnnnnnnnnnnnnnnnnnnnnnnnnnnnnnnnnnnnnnnnnnnnnnnnnnnnnnnnnnnnnnnnnnnnnnnnnnnnnnnnnnnnnnnnnnnnnnnnnnnnnnnnnnnnnnnnnnnnnnnnnnnnnnnnnnnnnnnnnnnnnnnnnnnnnnnnnnnnnnnnnnnnnnnnnnnnnnnnnnnnnnnnnnnnnnnnnnnnnnnnnnnnnnnnnnnnnnnnnnnnnnnnnnnnnnnnnnnnnnnnnnnnnnnnnnnnnnnnnnnnnnnnnnnnnnnnnnnnnnnnnnnnnnnnnnnnnnnnnnnnnnnnnnnnnnnnnnnnnnnnnnnnnnnnnnnnnnnnnnnnnnnnnnnnnnnnnnnnnnnnnnnnnnnnnnnnnnnnnnnnnnnnnnnnnnnnnnnnnnnnnnnnnnnnnnnnnnnnnnnnnnnnnnnnnnnnnnnnnnnnnnnnnnnnnnnnnnnnnnnnnnnnnnnnnnnnnnnnnnnnnnnnnnnnnnnnnnnnnnnnnnnnnnnnnnnnnnnnnnnnnnnnnnnnnnnnnnnnnnnnnnnnnnnnnnnnnnnnnnnnnnnnnnnnnnnnnnnnnnnnnnnnnnnnnnnnnnnnnnnnnnnnnnnnnnnnnnnnnnnnnnnnnnnnnnnnnnnnnnnnnnnnnnnnnnnnnnnnnnnnnnnnnnnnnnnnnnnnnnnnnnnnnnnnnnnnnnnnnnnnnnnnnnnnnnnnnnnnnnnnnnnnnnnnnnnnnnnnnnnnnnnnnnnnnnnnnnnnnnnnnnnnnnnnnnnnnnnnnnnnnnnnnnnnnnnnnnnnnnnnnnnnnnnnnnnnnnnnnnnnnnnnnnnnnnnnnnnnnnnnnnnnnnnnnnnnnnnnnnnnnnnnnnnnnnnnnnnnnnnnnnnnnnnnnnnnnnnnnnnnnnnnnnnnnnnnnnnnnnnnnnnnnnnnnnnnnnnnnnnnnnnnnnnnnnnnnnnnnnnnnnnnnnnnnnnnnnnnnnnnnnnnnnnnnnnnnnnnnnnnnnnnnnnnnnnnnnnnnnnnnnnnnnnnnnnnnnnnnnnnnnnnnnnnnnnnnnnnnnnnnnnnnnnnnnnnnnnnnnnnnnnnnnnnnnnnnnnnnnnnnnnnnnnnnnnnnnnnnnnnnnnnnnnnnnnnnnnnnnnnnnnnnnnnnnnnnnnnnnnnnnnnnnnnnnnnnnnnnnnnnnnnnnnnnnnnnnnnnnnnnnnnnnnnnnnnnnnnnnnnnnnnnnnnnnnnnnnnnnnnnnnnnnnnnnnnnnnnnnnnnnnnnnnnnnnnnnnnnnnnnnnnnnnnnnnnnnnnnnnnnnnnnnnnnnnnnnnnnnnnnnnnnnnnnnnnnnnnnnnnnnnnnnnnnnnnnnnnnnnnnnnnnnnnnnnnnnnnnnnnnnnnnnnnnnnnnnnnnnnnnnnnnnnnnnnnnnnnnnnnnnnnnnnnnnnnnnnnnnnnnnnnnnnnnnnnnnnnnnnnnnnnnnnnnnnnnnnnnnnnnnnnnnnnnnnnnnnnnnnnnnnnnnnnnnnnnnnnnnnnnnnnnnnnnnnnnnnnnnnnnnnnnnnnnnnnnnnnnnnnnnnnnnnnnnnnnnnnnnnnnnnnnnnnnnnnnnnnnnnnnnnnnnnnnnnnnnnnnnnnnnnnnnnnnnnnnnnnnnnnnnnnnnnnnnnnnnnnnnnnnnnnnnnnnnnnnnnnnnnnnnnnnnnnnnnnnnnnnnnnnnnnnnnnnnnnnnnnnnnnnnnnnnnnnnnnnnnnnnnnnnnnnnnnnnnnnnnnnnnnnnnnnnnnnnnnnnnnnnnnnnnnnnnnnnnnnnnnnnnnnnnnnnnnnnnnnnnnnnnnnnnnnnnnnnnnnnnnnnnnnnnnnnnnnnnnnnnnnnnnnnnnnnnnnnnnnnnnnnnnnnnnnnnnnnnnnnnnnnnnnnnnnnnnnnnnnnnnnnnnnnnnnnnnnnnnnnnnnnnnnnnnnnnnnnnnnnnnnnnnnnnnnnnnnnnnnnnnnnnnnnnnnnnnnnnnnnnnnnnnnnnnnnnnnnnnnnnnnnnnnnnnnnnnnnnnnnnnnnnnnnnnnnnnnnnnnnnnnnnnnnnnnnnnnnnnnnnnnnnnnnnnnnnnnnnnnnnnnnnnnnnnnnnnnnnnnnnnnnnnnnnnnnnnnnnnnnnnnnnnnnnnnnnnnnnnnnnnnnnnnnnnnnnnnnnnnnnnnnnnnnnnnnnnnnnnnnnnnnnnnnnnnnnnnnnnnnnnnnnnnnnnnnnnnnnnnnnnnnnnnnnnnnnnnnnnnnnnnnnnnnnnnnnnnnnnnnnnnnnnnnnnnnnnnnnnnnnnnnnnnnnnnnnnnnnnnnnnnnnnnnnnnnnnnnnnnnnnnnnnnnnnnnnnnnnnnnnnnnnnnnnnnnnnnnnnnnnnnnnnnnnnnnnnnnnnnnnnnnnnnnnnnnnnnnnnnnnnnnnnnnnnnnnnnnnnnnnnnnnnnnnnnnnnnnnnnnnnnnnnnnnnnnnnnnnnnnnnnnnnnnnnnnnnnnnnnnnnnnnnnnnnnnnnnnnnnnnnnnnnnnnnnnnnnnnnnnnnnnnnnnnnnnnnnnnnnnnnnnnnnnnnnnnnnnnnnnnnnnnnnnnnnnnnnnnnnnnnnnnnnnnnnnnnnnnnnnnnnnnnnnnnnnnnnnnnnnnnnnnnnnnnnnnnnnnnnnnnnnnnnnnnnnnnnnnnnnnnnnnnnnnnnnnnnnnnnnnnnnnnnnnnnnnnnnnnnnnnnnnnnnnnnnnnnnnnnnnnnnnnnnnnnnnnnnnnnnnnnnnnnnnnnnnnnnnnnnnnnnnnnnnnnnnnnnnnnnnnnnnnnnnnnnnnnnnnnnnnnnnnnnnnnnnnnnnnnnnnnnnnnnnnnnnnnnnnnnnnnnnnnnnnnnnnnnnnnnnnnnnnnnnnnnnnnnnnnnnnnnnnnnnnnnnnnnnnnnnnnnnnnnnnnnnnnnnnnnnnnnnnnnnnnnnnnnnnnnnnnnnnnnnnnnnnnnnnnnnnnnnnnnnnnnnnnnnnnnnnnnnnnnnnnnnnnnnnnnnnnnnnnnnnnnnnnnnnnnnnnnnnnnnnnnnnnnnnnnnnnnnnnnnnnnnnnnnnnnnnnnnnnnnnnnnnnnnnnnnnnnnnnnnnnnnnnnnnnnnnnnnnnnnnnnnnnnnnnnnnnnnnnnnnnnnnnnnnnnnnnnnnnnnnnnnnnnnnnnnnnnnnnnnnnnnnnnnnnnnnnnnnnnnnnnnnnnnnnnnnnnnnnnnnnnnnnnnnnnnnnnnnnnnnnnnnnnnnnnnnnnnnnnnnnnnnnnnnnnnnnnnnnnnnnnnnnnnnnnnnnnnnnnnnnnnnnnnnnnnnnnnnnnnnnnnnnnnnnnnnnnnnnnnnnnnnnnnnnnnnnnnnnnnnnnnnnnnnnnnnnnnnnnnnnnnnnnnnnnnnnnnnnnnnnnnnnnnnnnnnnnnnnnnnnnnnnnnnnnnnnnnnnnnnnnnnnnnnnnnnnnnnnnnnnnnnnnnnnnnnnnnnnnnnnnnnnnnnnnnnnnnnnnnnnnnnnnnnnnnnnnnnnnnnnnnnnnnnnnnnnnnnnnnnnnnnnnnnnnnnnnnnnnnnnnnnnnnnnnnnnnnnnnnnnnnnnnnnnnnnnnnnnnnnnnnnnnnnnnnnnnnnnnnnnnnnnnnnnnnnnnnnnnnnnnnnnnnnnnnnnnnnnnnnnnnnnnnnnnnnnnnnnnnnnnnnnnnnnnnnnnnnnnnnnnnnnnnnnnnnnnnnnnnnnnnnnnnnnnnnnnnnnnnnnnnnnnnnnnnnnnnnnnnnnnnnnnnnnnnnnnnnnnnnnnnnnnnnnnnnnnnnnnnnnnnnnnnnnnnnnnnnnnnnnnnnnnnnnnnnnnnnnnnnnnnnnnnnnnnnnnnnnnnnnnnnnnnnnnnnnnnnnnnnnnnnnnnnnnnnnnnnnnnnnnnnnnnnnnnnnnnnnnnnnnnnnnnnnnnnnnnnnnnnnnnnnnnnnnnnnnnnnnnnnnnnnnnnnnnnnnnnnnnnnnnnnnnnnnnnnnnnnnnnnnnnnnnnnnnnnnnnnnnnnnnnnnnnnnnnnnnnnnnnnnnnnnnnnnnnnnnnnnnnnnnnnnnnnnnnnnnnnnnnnnnnnnnnnnnnnnnnnnnnnnnnnnnnnnnnnnnnnnnnnnnnnnnnnnnnnnnnnnnnnnnnnnnnnnnnnnnnnnnnnnnnnnnnnnnnnnnnnnnnnnnnnnnnnnnnnnnnnnnnnnnnnnnnnnnnnnnnnnnnnnnnnnnnnnnnnnnnnnnnnnnnnnnnnnnnnnnnnnnnnnnnnnnnnnnnnnnnnnnnnnnnnnnnnnnnnnnnnnnnnnnnnnnnnnnnnnnnnnnnnnnnnnnnnnnnnnnnnnnnnnnnnnnnnnnnnnnnnnnnnnnnnnnnnnnnnnnnnnnnnnnnnnnnnnnnnnnnnnnnnnnnnnnnnnnnnnnnnnnnnnnnnnnnnnnnnnnnnnnnnnnnnnnnnnnnnnnnnnnnnnnnnnnnnnnnnnnnnnnnnnnnnnnnnnnnnnnnnnnnnnnnnnnnnnnnnnnnnnnnnnnnnnnnnnnnnnnnnnnnnnnnnnnnnnnnnnnnnnnnnnnnnnnnnnnnnnnnnnnnnnnnnnnnnnnnnnnnnnnnnnnnnnnnnnnnnnnnnnnnnnnnnnnnnnnnnnnnnnnnnnnnnnnnnnnnnnnnnnnnnnnnnnnnnnnnnnnnnnnnnnnnnnnnnnnnnnnnnnnnnnnnnnnnnnnnnnnnnnnnnnnnnnnnnnnnnnnnnnnnnnnnnnnnnnnnnnnnnnnnnnnnnnnnnnnnnnnnnnnnnnnnnnnnnnnnnnnnnnnnnnnnnnnnnnnnnnnnnnnnnnnnnnnnnnnnnnnnnnnnnnnnnnnnnnnnnnnnnnnnnnnnnnnnnnnnnnnnnnnnnnnnnnnnnnnnnnnnnnnnnnnnnnnnnnnnnnnnnnnnnnnnnnnnnnnnnnnnnnnnnnnnnnnnnnnnnnnnnnnnnnnnnnnnnnnnnnnnnnnnnnnnnnnnnnnnnnnnnnnnnnnnnnnnnnnnnnnnnnnnnnnnnnnnnnnnnnnnnnnnnnnnnnnnnnnnnnnnnnnnnnnnnnnnnnnnnnnnnnnnnnnnnnnnnnnnnnnnnnnnnnnnnnnnnnnnnnnnnnnnnnnnnnnnnnnnnnnnnnnnnnnnnnnnnnnnnnnnnnnnnnnnnnnnnnnnnnnnnnnnnnnnnnnnnnnnnnnnnnnnnnnnnnnnnnnnnnnnnnnnnnnnnnnnnnnnnnnnnnnnnnnnnnnnnnnnnnnnnnnnnnnnnnnnnnnnnnnnnnnnnnnnnnnnnnnnnnnnnnnnnnnnnnnnnnnnnnnnnnnnnnnnnnnnnnnnnnnnnnnnnnnnnnnnnnnnnnnnnnnnnnnnnnnnnnnnnnnnnnnnnnnnnnnnnnnnnnnnnnnnnnnnnnnnnnnnnnnnnnnnnnnnnnnnnnnnnnnnnnnnnnnnnnnnnnnnnnnnnnnnnnnnnnnnnnnnnnnnnnnnnnnnnnnnnnnnnnnnnnnnnnnnnnnnnnnnnnnnnnnnnnnnnnnnnnnnnnnnnnnnnnnnnnnnnnnnnnnnnnnnnnnnnnnnnnnnnnnnnnnnnnnnnnnnnnnnnnnnnnnnnnnnnnnnnnnnnnnnnnnnnnnnnnnnnnnnnnnnnnnnnnnnnnnnnnnnnnnnnnnnnnnnnnnnnnnnnnnnnnnnnnnnnnnnnnnnnnnnnnnnnnnnnnnnnnnnnnnnnnnnnnnnnnnnnnnnnnnnnnnnnnnnnnnnnnnnnnnnnnnnnnnnnnnnnnnnnnnnnnnnnnnnnnnnnnnnnnnnnnnnnnnnnnnnnnnnnnnnnnnnnnnnnnnnnnnnnnnnnnnnnnnnnnnnnnnnnnnnnnnnnnnnnnnnnnnnnnnnnnnnnnnnnnnnnnnnnnnnnnnnnnnnnnnnnnnnnnnnnnnnnnnnnnnnnnnnnnnnnnnnnnnnnnnnnnnnnnnnnnnnnnnnnnnnnnnnnnnnnnnnnnnnnnnnnnnnnnnnnnnnnnnnnnnnnnnnnnnnnnnnnnnnnnnnnnnnnnnnnnnnnnnnnnnnnnnnnnnnnnnnnnnnnnnnnnnnnnnnnnnnnnnnnnnnnnnnnnnnnnnnnnnnnnnnnnnnnnnnnnnnnnnnnnnnnnnnnnnnnnnnnnnnnnnnnnnnnnnnnnnnnnnnnnnnnnnnnnnnnnnnnnnnnnnnnnnnnnnnnnnnnnnnnnnnnnnnnnnnnnnnnnnnnnnnnnnnnnnnnnnnnnnnnnnnnnnnnnnnnnnnnnnnnnnnnnnnnnnnnnnnnnnnnnnnnnnnnnnnnnnnnnnnnnnnnnnnnnnnnnnnnnnnnnnnnnnnnnnnnnnnnnnnnnnnnnnnnnnnnnnnnnnnnnnnnnnnnnnnnnnnnnnnnnnnnnnnnnnnnnnnnnnnnnnnnnnnnnnnnnnnnnnnnnnnnnnnnnnnnnnnnnnnnnnnnnnnnnnnnnnnnnnnnnnnnnnnnnnnnnnnnnnnnnnnnnnnnnnnnnnnnnnnnnnnnnnnnnnnnnnnnnnnnnnnnnnnnnnnnnnnnnnnnnnnnnnnnnnnnnnnnnnnnnnnnnnnnnnnnnnnnnnnnnnnnnnnnnnnnnnnnnnnnnnnnnnnnnnnnnnnnnnnnnnnnnnnnnnnnnnnnnnnnnnnnnnnnnnnnnnnnnnnnnnnnnnnnnnnnnnnnnnnnnnnnnnnnnnnnnnnnnnnnnnnnnnnnnnnnnnnnnnnnnnnnnnnnnnnnnnnnnnnnnnnnnnnnnnnnnnnnnnnnnnnnnnnnnnnnnnnnnnnnnnnnnnnnnnnnnnnnnnnnnnnnnnnnnnnnnnnnnnnnnnnnnnnnnnnnnnnnnnnnnnnnnnnnnnnnnnnnnnnnnnnnnnnnnnnnnnnnnnnnnnnnnnnnnnnnnnnnnnnnnnnnnnnnnnnnnnnnnnnnnnnnnnnnnnnnnnnnnnnnnnnnnnnnnnnnnnnnnnnnnnnnnnnnnnnnnnnnnnnnnnnnnnnnnnnnnnnnnnnnnnnnnnnnnnnnnnnnnnnnnnnnnnnnnnnnnnnnnnnnnnnnnnnnnnnnnnnnnnnnnnnnnnnnnnnnnnnnnnnnnnnnnnnnnnnnnnnnnnnnnnnnnnnnnnnnnnnnnnnnnnnnnnnnnnnnnnnnnnnnnnnnnnnnnnnnnnnnnnnnnnnnnnnnnnnnnnnnnnnnnnnnnnnnnnnnnnnnnnnnnnnnnnnnnnnnnnnnnnnnnnnnnnnnnnnnnnnnnnnnnnnnnnnnnnnnnnnnnnnnnnnnnnnnnnnnnnnnnnnnnnnnnnnnnnnnnnnnnnnnnnnnnnnnnnnnnnnnnnnnnnnnnnnnnnnnnnnnnnnnnnnnnnnnnnnnnnnnnnnnnnnnnnnnnnnnnnnnnnnnnnnnnnnnnnnnnnnnnnnnnnnnnnnnnnnnnnnnnnnnnnnnnnnnnnnnnnnnnnnnnnnnnnnnnnnnnnnnnnnnnnnnnnnnnnnnnnnnnnnnnnnnnnnnnnnnnnnnnnnnnnnnnnnnnnnnnnnnnnnnnnnnnnnnnnnnnnnnnnnnnnnnnnnnnnnnnnnnnnnnnnnnnnnnnnnnnnnnnnnnnnnnnnnnnnnnnnnnnnnnnnnnnnnnnnnnnnnnnnnnnnnnnnnnnnnnnnnnnnnnnnnnnnnnnnnnnnnnnnnnnnnnnnnnnnnnnnnnnnnnnnnnnnnnnnnnnnnnnnnnnnnnnnnnnnnnnnnnnnnnnnnnnnnnnnnnnnnnnnnnnnnnnnnnnnnnnnnnnnnnnnnnnnnnnnnnnnnnnnnnnnnnnnnnnnnnnnnnnnnnnnnnnnnnnnnnnnnnnnnnnnnnnnnnnnnnnnnnnnnnnnnnnnnnnnnnnnnnnnnnnnnnnnnnnnnnnnnnnnnnnnnnnnnnnnnnnnnnnnnnnnnnnnnnnnnnnnnnnnnnnnnnnnnnnnnnnnnnnnnnnnnnnnnnnnnnnnnnnnnnnnnnnnnnnnnnnnnnnnnnnnnnnnnnnnnnnnnnnnnnnnnnnnnnnnnnnnnnnnnnnnnnnnnnnnnnnnnnnnnnnnnnnnnnnnnnnnnnnnnnnnnnnnnnnnnnnnnnnnnnnnnnnnnnnnnnnnnnnnnnnnnnnnnnnnnnnnnnnnnnnnnnnnnnnnnnnnnnnnnnnnnnnnnnnnnnnnnnnnnnnnnnnnnnnnnnnnnnnnnnnnnnnnnnnnnnnnnnnnnnnnnnnnnnnnnnnnnnnnnnnnnnnnnnnnnnnnnnnnnnnnnnnnnnnnnnnnnnnnnnnnnnnnnnnnnnnnnnnnnnnnnnnnnnnnnnnnnnnnnnnnnnnnnnnnnnnnnnnnnnnnnnnnnnnnnnnnnnnnnnnnnnnnnnnnnnnnnnnnnnnnnnnnnnnnnnnnnnnnnnnnnnnnnnnnnnnnnnnnnnnnnnnnnnnnnnnnnnnnnnnnnnnnnnnnnnnnnnnnnnnnnnnnnnnnnnnnnnnnnnnnnnnnnnnnnnnnnnnnnnnnnnnnnnnnnnnnnnnnnnnnnnnnnnnnnnnnnnnnnnnnnnnnnnnnnnnnnnnnnnnnnnnnnnnnnnnnnnnnnnnnnnnnnnnnnnnnnnnnnnnnnnnnnnnnnnnnnnnnnnnnnnnnnnnnnnnnnnnnnnnnnnnnnnnnnnnnnnnnnnnnnnnnnnnnnnnnnnnnnnnnnnnnnnnnnnnnnnnnnnnnnnnnnnnnnnnnnnnnnnnnnnnnnnnnnnnnnnnnnnnnnnnnnnnnnnnnnnnnnnnnnnnnnnnnnnnnnnnnnnnnnnnnnnnnnnnnnnnnnnnnnnnnnnnnnnnnnnnnnnnnnnnnnnnnnnnnnnnnnnnnnnnnnnnnnnnnnnnnnnnnnnnnnnnnnnnnnnnnnnnnnnnnnnnnnnnnnnnnnnnnnnnnnnnnnnnnnnnnnnnnnnnnnnnnnnnnnnnnnnnnnnnnnnnnnnnnnnnnnnnnnnnnnnnnnnnnnnnnnnnnnnnnnnnnnnnnnnnnnnnnnnnnnnnnnnnnnnnnnnnnnnnnnnnnnnnnnnnnnnnnnnnnnnnnnnnnnnnnnnnnnnnnnnnnnnnnnnnnnnnnnnnnnnnnnnnnnnnnnnnnnnnnnnnnnnnnnnnnnnnnnnnnnnnnnnnnnnnnnnnnnnnnnnnnnnnnnnnnnnnnnnnnnnnnnnnnnnnnnnnnnnnnnnnnnnnnnnnnnnnnnnnnnnnnnnnnnnnnnnnnnnnnnnnnnnnnnnnnnnnnnnnnnnnnnnnnnnnnnnnnnnnnnnnnnnnnnnnnnnnnnnnnnnnnnnnnnnnnnnnnnnnnnnnnnnnnnnnnnnnnnnnnnnnnnnnnnnnnnnnnnnnnnnnnnnnnnnnnnnnnnnnnnnnnnnnnnnnnnnnnnnnnnnnnnnnnnnnnnnnnnnnnnnnnnnnnnnnnnnnnnnnnnnnnnnnnnnnnnnnnnnnnnnnnnnnnnnnnnnnnnnnnnnnnnnnnnnnnnnnnnnnnnnnnnnnnnnnnnnnnnnnnnnnnnnnnnnnnnnnnnnnnnnnnnnnnnnnnnnnnnnnnnnnnnnnnnnnnnnnnnnnnnnnnnnnnnnnnnnnnnnnnnnnnnnnnnnnnnnnnnnnnnnnnnnnnnnnnnnnnnnnnnnnnnnnnnnnnnnnnnnnnnnnnnnnnnnnnnnnnnnnnnnnnnnnnnnnnnnnnnnnnnnnnnnnnnnnnnnnnnnnnnnnnnnnnnnnnnnnnnnnnnnnnnnnnnnnnnnnnnnnnnnnnnnnnnnnnnnnnnnnnnnnnnnnnnnnnnnnnnnnnnnnnnnnnnnnnnnnnnnnnnnnnnnnnnnnnnnnnnnnnnnnnnnnnnnnnnnnnnnnnnnnnnnnnnnnnnnnnnnnnnnnnnnnnnnnnnnnnnnnnnnnnnnnnnnnnnnnnnnnnnnnnnnnnnnnnnnnnnnnnnnnnnnnnnnnnnnnnnnnnnnnnnnnnnnnnnnnnnnnnnnnnnnnnnnnnnnnnnnnnnnnnnnnnnnnnnnnnnnnnnnnnnnnnnnnnnnnnnnnnnnnnnnnnnnnnnnnnnnnnnnnnnnnnnnnnnnnnnnnnnnnnnnnnnnnnnnnnnnnnnnnnnnnnnnnnnnnnnnnnnnnnnnnnnnnnnnnnnnnnnnnnnnnnnnnnnnnnnnnnnnnnnnnnnnnnnnnnnnnnnnnnnnnnnnnnnnnnnnnnnnnnnnnnnnnnnnnnnnnnnnnnnnnnnnnnnnnnnnnnnnnnnnnnnnnnnnnnnnnnnnnnnnnnnnnnnnnnnnnnnnnnnnnnnnnnnnnnnnnnnnnnnnnnnnnnnnnnnnnnnnnnnnnnnnnnnnnnnnnnnnnnnnnnnnnnnnnnnnnnnnnnnnnnnnnnnnnnnnnnnnnnnnnnnnnnnnnnnnnnnnnnnnnnnnnnnnnnnnnnnnnnnnnnnnnnnnnnnnnnnnnnnnnnnnnnnnnnnnnnnnnnnnnnnnnnnnnnnnnnnnnnnnnnnnnnnnnnnnnnnnnnnnnnnnnnnnnnnnnnnnnnnnnnnnnnnnnnnnnnnnnnnnnnnnnnnnnnnnnnnnnnnnnnnnnnnnnnnnnnnnnnnnnnnnnnnnnnnnnnnnnnnnnnnnnnnnnnnnnnnnnnnnnnnnnnnnnnnnnnnnnnnnnnnnnnnnnnnnnnnnnnnnnnnnnnnnnnnnnnnnnnnnnnnnnnnnnnnnnnnnnnnnnnnnnnnnnnnnnnnnnnnnnnnnnnnnnnnnnnnnnnnnnnnnnnnnnnnnnnnnnnnnnnnnnnnnnnnnnnnnnnnnnnnnnnnnnnnnnnnnnnnnnnnnnnnnnnnnnnnnnnnnnnnnnnnnnnnnnnnnnnnnnnnnnnnnnnnnnnnnnnnnnnnnnnnnnnnnnnnnnnnnnnnnnnnnnnnnnnnnnnnnnnnnnnnnnnnnnnnnnnnnnnnnnnnnnnnnnnnnnnnnnnnnnnnnnnnnnnnnnnnnnnnnnnnnnnnnnnnnnnnnnnnnnnnnnnnnnnnnnnnnnnnnnnnnnnnnnnnnnnnnnnnnnnnnnnnnnnnnnnnnnnnnnnnnnnnnnnnnnnnnnnnnnnnnnnnnnnnnnnnnnnnnnnnnnnnnnnnnnnnnnnnnnnnnnnnnnnnnnnnnnnnnnnnnnnnnnnnnnnnnnnnnnnnnnnnnnnnnnnnnnnnnnnnnnnnnnnnnnnnnnnnnnnnnnnnnnnnnnnnnnnnnnnnnnnnnnnnnnnnnnnnnnnnnnnnnnnnnnnnnnnnnnnnnnnnnnnnnnnnnnnnnnnnnnnnnnnnnnnnnnnnnnnnnnnnnnnnnnnnnnnnnnnnnnnnnnnnnnnnnnnnnnnnnnnnnnnnnnnnnnnnnnnnnnnnnnnnnnnnnnnnnnnnnnnnnnnnnnnnnnnnnnnnnnnnnnnnnnnnnnnnnnnnnnnnnnnnnnnnnnnnnnnnnnnnnnnnnnnnnnnnnnnnnnnnnnnnnnnnnnnnnnnnnnnnnnnnnnnnnnnnnnnnnnnnnnnnnnnnnnnnnnnnnnnnnnnnnnnnnnnnnnnnnnnnnnnnnnnnnnnnnnnnnnnnnnnnnnnnnnnnnnnnnnnnnnnnnnnnnnnnnnnnnnnnnnnnnnnnnnnnnnnnnnnnnnnnnnnnnnnnnnnnnnnnnnnnnnnnnnnnnnnnnnnnnnnnnnnnnnnnnnnnnnnnnnnnnnnnnnnnnnnnnnnnnnnnnnnnnnnnnnnnnnnnnnnnnnnnnnnnnnnnnnnnnnnnnnnnnnnnnnnnnnnnnnnnnnnnnnnnnnnnnnnnnnnnnnnnnnnnnnnnnnnnnnnnnnnnnnnnnnnnnnnnnnnnnnnnnnnnnnnnnnnnnnnnnnnnnnnnnnnnnnnnnnnnnnnnnnnnnnnnnnnnnnnnnnnnnnnnnnnnnnnnnnnnnnnnnnnnnnnnnnnnnnnnnnnnnnnnnnnnnnnnnnnnnnnnnnnnnnnnnnnnnnnnnnnnnnnnnnnnnnnnnnnnnnnnnnnnnnnnnnnnnnnnnnnnnnnnnnnnnnnnnnnnnnnnnnnnnnnnnnnnnnnnnnnnnnnnnnnnnnnnnnnnnnnnnnnnnnnnnnnnnnnnnnnnnnnnnnnnnnnnnnnnnnnnnnnnnnnnnnnnnnnnnnnnnnnnnnnnnnnnnnnnnnnnnnnnnnnnnnnnnnnnnnnnnnnnnnnnnnnnnnnnnnnnnnnnnnnnnnnnnnnnnnnnnnnnnnnnnnnnnnnnnnnnnnnnnnnnnnnnnnnnnnnnnnnnnnnnnnnnnnnnnnnnnnnnnnnnnnnnnnnnnnnnnnnnnnnnnnnnnnnnnnnnnnnnnnnnnnnnnnnnnnnnnnnnnnnnnnnnnnnnnnnnnnnnnnnnnnnnnnnnnnnnnnnnnnnnnnnnnnnnnnnnnnnnnnnnnnnnnnnnnnnnnnnnnnnnnnnnnnnnnnnnnnnnnnnnnnnnnnnnnnnnnnnnnnnnnnnnnnnnnnnnnnnnnnnnnnnnnnnnnnnnnnnnnnnnnnnnnnnnnnnnnnnnnnnnnnnnnnnnnnnnnnnnnnnnnnnnnnnnnnnnnnnnnnnnnnnnnnnnnnnnnnnnnnnnnnnnnnnnnnnnnnnnnnnnnnnnnnnnnnnnnnnnnnnnnnnnnnnnnnnnnnnnnnnnnnnnnnnnnnnnnnnnnnnnnnnnnnnnnnnnnnnnnnnnnnnnnnnnnnnnnnnnnnnnnnnnnnnnnnnnnnnnnnnnnnnnnnnnnnnnnnnnnnnnnnnnnnnnnnnnnnnnnnnnnnnnnnnnnnnnnnnnnnnnnnnnnnnnnnnnnnnnnnnnnnnnnnnnnnnnnnnnnnnnnnnnnnnnnnnnnnnnnnnnnnnnnnnnnnnnnnnnnnnnnnnnnnnnnnnnnnnnnnnnnnnnnnnnnnnnnnnnnnnnnnnnnnnnnnnnnnnnnnnnnnnnnnnnnnnnnnnnnnnnnnnnnnnnnnnnnnnnnnnnnnnnnnnnnnnnnnnnnnnnnnnnnnnnnnnnnnnnnnnnnnnnnnnnnnnnnnnnnnnnnnnnnnnnnnnnnnnnnnnnnnnnnnnnnnnnnnnnnnnnnnnnnnnnnnnnnnnnnnnnnnnnnnnnnnnnnnnnnnnnnnnnnnnnnnnnnnnnnnnnnnnnnnnnnnnnnnnnnnnnnnnnnnnnnnnnnnnnnnnnnnnnnnnnnnnnnnnnnnnnnnnnnnnnnnnnnnnnnnnnnnnnnnnnnnnnnnnnnnnnnnnnnnnnnnnnnnnnnnnnnnnnnnnnnnnnnnnnnnnnnnnnnnnnnnnnnnnnnnnnnnnnnnnnnnnnnnnnnnnnnnnnnnnnnnnnnnnnnnnnnnnnnnnnnnnnnnnnnnnnnnnnnnnnnnnnnnnnnnnnnnnnnnnnnnnnnnnnnnnnnnnnnnnnnnnnnnnnnnnnnnnnnnnnnnnnnnnnnnnnnnnnnnnnnnnnnnnnnnnnnnnnnnnnnnnnnnnnnnnnnnnnnnnnnnnnnnnnnnnnnnnnnnnnnnnnnnnnnnnnnnnnnnnnnnnnnnnnnnnnnnnnnnnnnnnnnnnnnnnnnnnnnnnnnnnnnnnnnnnnnnnnnnnnnnnnnnnnnnnnnnnnnnnnnnnnnnnnnnnnnnnnnnnnnnnnnnnnnnnnnnnnnnnnnnnnnnnnnnnnnnnnnnnnnnnnnnnnnnnnnnnnnnnnnnnnnnnnnnnnnnnnnnnnnnnnnnnnnnnnnnnnnnnnnnnnnnnnnnnnnnnnnnnnnnnnnnnnnnnnnnnnnnnnnnnnnnnnnnnnnnnnnnnnnnnnnnnnnnnnnnnnnnnnnnnnnnnnnnnnnnnnnnnnnnnnnnnnnnnnnnnnnnnnnnnnnnnnnnnnnnnnnnnnnnnnnnnnnnnnnnnnnnnnnnnnnnnnnnnnnnnnnnnnnnnnnnnnnnnnnnnnnnnnnnnnnnnnnnnnnnnnnnnnnnnnnnnnnnnnnnnnnnnnnnnnnnnnnnnnnnnnnnnnnnnnnnnnnnnnnnnnnnnnnnnnnnnnnnnnnnnnnnnnnnnnnnnnnnnnnnnnnnnnnnnnnnnnnnnnnnnnnnnnnnnnnnnnnnnnnnnnnnnnnnnnnnnnnnnnnnnnnnnnnnnnnnnnnnnnnnnnnnnnnnnnnnnnnnnnnnnnnnnnnnnnnnnnnnnnnnnnnnnnnnnnnnnnnnnnnnnnnnnnnnnnnnnnnnnnnnnnnnnnnnnnnnnnnnnnnnnnnnnnnnnnnnnnnnnnnnnnnnnnnnnnnnnnnnnnnnnnnnnnnnnnnnnnnnnnnnnnnnnnnnnnnnnnnnnnnnnnnnnnnnnnnnnnnnnnnnnnnnnnnnnnnnnnnnnnnnnnnnnnnnnnnnnnnnnnnnnnnnnnnnnnnnnnnnnnnnnnnnnnnnnnnnnnnnnnnnnnnnnnnnnnnnnnnnnnnnnnnnnnnnnnnnnnnnnnnnnnnnnnnnnnnnnnnnnnnnnnnnnnnnnnnnnnnnnnnnnnnnnnnnnnnnnnnnnnnnnnnnnnnnnnnnnnnnnnnnnnnnnnnnnnnnnnnnnnnnnnnnnnnnnnnnnnnnnnnnnnnnnnnnnnnnnnnnnnnnnnnnnnnnnnnnnnnnnnnnnnnnnnnnnnnnnnnnnnnnnnnnnnnnnnnnnnnnnnnnnnnnnnnnnnnnnnnnnnnnnnnnnnnnnnnnnnnnnnnnnnnnnnnnnnnnnnnnnnnnnnnnnnnnnnnnnnnnnnnnnnnnnnnnnnnnnnnnnnnnnnnnnnnnnnnnnnnnnnnnnnnnnnnnnnnnnnnnnnnnnnnnnnnnnnnnnnnnnnnnnnnnnnnnnnnnnnnnnnnnnnnnnnnnnnnnnnnnnnnnnnnnnnnnnnnnnnnnnnnnnnnnnnnnnnnnnnnnnnnnnnnnnnnnnnnnnnnnnnnnnnnnnnnnnnnnnnnnnnnnnnnnnnnnnnnnnnnnnnnnnnnnnnnnnnnnnnnnnnnnnnnnnnnnnnnnnnnnnnnnnnnnnnnnnnnnnnnnnnnnnnnnnnnnnnnnnnnnnnnnnnnnnnnnnnnnnnnnnnnnnnnnnnnnnnnnnnnnnnnnnnnnnnnnnnnnnnnnnnnnnnnnnnnnnnnnnnnnnnnnnnnnnnnnnnnnnnnnnnnnnnnnnnnnnnnnnnnnnnnnnnnnnnnnnnnnnnnnnnnnnnnnnnnnnnnnnnnnnnnnnnnnnnnnnnnnnnnnnnnnnnnnnnnnnnnnnnnnnnnnnnnnnnnnnnnnnnnnnnnnnnnnnnnnnnnnnnnnnnnnnnnnnnnnnnnnnnnnnnnnnnnnnnnnnnnnnnnnnnnnnnnnnnnnnnnnnnnnnnnnnnnnnnnnnnnnnnnnnnnnnnnnnnnnnnnnnnnnnnnnnnnnnnnnnnnnnnnnnnnnnnnnnnnnnnnnnnnnnnnnnnnnnnnnnnnnnnnnnnnnnnnnnnnnnnnnnnnnnnnnnnnnnnnnnnnnnnnnnnnnnnnnnnnnnnnnnnnnnnnnnnnnnnnnnnnnnnnnnnnnnnnnnnnnnnnnnnnnnnnnnnnnnnnnnnnnnnnnnnnnnnnnnnnnnnnnnnnnnnnnnnnnnnnnnnnnnnnnnnnnnnnnnnnnnnnnnnnnnnnnnnnnnnnnnnnnnnnnnnnnnnnnnnnnnnnnnnnnnnnnnnnnnnnnnnnnnnnnnnnnnnnnnnnnnnnnnnnnnnnnnnnnnnnnnnnnnnnnnnnnnnnnnnnnnnnnnnnnnnnnnnnnnnnnnnnnnnnnnnnnnnnnnnnnnnnnnnnnnnnnnnnnnnnnnnnnnnnnnnnnnnnnnnnnnnnnnnnnnnnnnnnnnnnnnnnnnnnnnnnnnnnnnnnnnnnnnnnnnnnnnnnnnnnnnnnnnnnnnnnnnnnnnnnnnnnnnnnnnnnnnnnnnnnnnnnnnnnnnnnnnnnnnnnnnnnnnnnnnnnnnnnnnnnnnnnnnnnnnnnnnnnnnnnnnnnnnnnnnnnnnnnnnnnnnnnnnnnnnnnnnnnnnnnnnnnnnnnnnnnnnnnnnnnnnnnnnnnnnnnnnnnnnnnnnnnnnnnnnnnnnnnnnnnnnnnnnnnnnnnnnnnnnnnnnnnnnnnnnnnnnnnnnnnnnnnnnnnnnnnnnnnnnnnnnnnnnnnnnnnnnnnnnnnnnnnnnnnnnnnnnnnnnnnnnnnnnnnnnnnnnnnnnnnnnnnnnnnnnnnnnnnnnnnnnnnnnnnnnnnnnnnnnnnnnnnnnnnnnnnnnnnnnnnnnnnnnnnnnnnnnnnnnnnnnnnnnnnnnnnnnnnnnnnnnnnnnnnnnnnnnnnnnnnnnnnnnnnnnnnnnnnnnnnnnnnnnnnnnnnnnnnnnnnnnnnnnnnnnnnnnnnnnnnnnnnnnnnnnnnnnnnnnnnnnnnnnnnnnnnnnnnnnnnnnnnnnnnnnnnnnnnnnnnnnnnnnnnnnnnnnnnnnnnnnnnnnnnnnnnnnnnnnnnnnnnnnnnnnnnnnnnnnnnnnnnnnnnnnnnnnnnnnnnnnnnnnnnnnnnnnnnnnnnnnnnnnnnnnnnnnnnnnnnnnnnnnnnnnnnnnnnnnnnnnnnnnnnnnnnnnnnnnnnnnnnnnnnnnnnnnnnnnnnnnnnnnnnnnnnnnnnnnnnnnnnnnnnnnnnnnnnnnnnnnnnnnnnnnnnnnnnnnnnnnnnnnnnnnnnnnnnnnnnnnnnnnnnnnnnnnnnnnnnnnnnnnnnnnnnnnnnnnnnnnnnnnnnnnnnnnnnnnnnnnnnnnnnnnnnnnnnnnnnnnnnnnnnnnnnnnnnnnnnnnnnnnnnnnnnnnnnnnnnnnnnnnnnnnnnnnnnnnnnnnnnnnnnnnnnnnnnnnnnnnnnnnnnnnnnnnnnnnnnnnnnnnnnnnnnnnnnnnnnnnnnnnnnnnnnnnnnnnnnnnnnnnnnnnnnnnnnnnnnnnnnnnnnnnnnnnnnnnnnnnnnnnnnnnnnnnnnnnnnnnnnnnnnnnnnnnnnnnnnnnnnnnnnnnnnnnnnnnnnnnnnnnnnnnnnnnnnnnnnnnnnnnnnnnnnnnnnnnnnnnnnnnnnnnnnnnnnnnnnnnnnnnnnnnnnnnnnnnnnnnnnnnnnnnnnnnnnnnnnnnnnnnnnnnnnnnnnnnnnnnnnnnnnnnnnnnnnnnnnnnnnnnnnnnnnnnnnnnnnnnnnnnnnnnnnnnnnnnnnnnnnnnnnnnnnnnnnnnnnnnnnnnnnnnnnnnnnnnnnnnnnnnnnnnnnnnnnnnnnnnnnnnnnnnnnnnnnnnnnnnnnnnnnnnnnnnnnnnnnnnnnnnnnnnnnnnnnnnnnnnnnnnnnnnnnnnnnnnnnnnnnnnnnnnnnnnnnnnnnnnnnnnnnnnnnnnnnnnnnnnnnnnnnnnnnnnnnnnnnnnnnnnnnnnnnnnnnnnnnnnnnnnnnnnnnnnnnnnnnnnnnnnnnnnnnnnnnnnnnnnnnnnnnnnnnnnnnnnnnnnnnnnnnnnnnnnnnnnnnnnnnnnnnnnnnnnnnnnnnnnnnnnnnnnnnnnnnnnnnnnnnnnnnnnnnnnnnnnnnnnnnnnnnnnnnnnnnnnnnnnnnnnnnnnnnnnnnnnnnnnnnnnnnnnnnnnnnnnnnnnnnnnnnnnnnnnnnnnnnnnnnnnnnnnnnnnnnnnnnnnnnnnnnnnnnnnnnnnnnnnnnnnnnnnnnnnnnnnnnnnnnnnnnnnnnnnnnnnnnnnnnnnnnnnnnnnnnnnnnnnnnnnnnnnnnnnnnnnnnnnnnnnnnnnnnnnnnnnnnnnnnnnnnnnnnnnnnnnnnnnnnnnnnnnnnnnnnnnnnnnnnnnnnnnnnnnnnnnnnnnnnnnnnnnnnnnnnnnnnnnnnnnnnnnnnnnnnnnnnnnnnnnnnnnnnnnnnnnnnnnnnnnnnnnnnnnnnnnnnnnnnnnnnnnnnnnnnnnnnnnnnnnnnnnnnnnnnnnnnnnnnnnnnnnnnnnnnnnnnnnnnnnnnnnnnnnnnnnnnnnnnnnnnnnnnnnnnnnnnnnnnnnnnnnnnnnnnnnnnnnnnnnnnnnnnnnnnnnnnnnnnnnnnnnnnnnnnnnnnnnnnnnnnnnnnnnnnnnnnnnnnnnnnnnnnnnnnnnnnnnnnnnnnnnnnnnnnnnnnnnnnnnnnnnnnnnnnnnnnnnnnnnnnnnnnnnnnnnnnnnnnnnnnnnnnnnnnnnnnnnnnnnnnnnnnnnnnnnnnnnnnnnnnnnnnnnnnnnnnnnnnnnnnnnnnnnnnnnnnnnnnnnnnnnnnnnnnnnnnnnnnnnnnnnnnnnnnnnnnnnnnnnnnnnnnnnnnnnnnnnnnnnnnnnnnnnnnnnnnnnnnnnnnnnnnnnnnnnnnnnnnnnnnnnnnnnnnnnnnnnnnnnnnnnnnnnnnnnnnnnnnnnnnnnnnnnnnnnnnnnnnnnnnnnnnnnnnnnnnnnnnnnnnnnnnnnnnnnnnnnnnnnnnnnnnnnnnnnnnnnnnnnnnnnnnnnnnnnnnnnnnnnnnnnnnnnnnnnnnnnnnnnnnnnnnnnnnnnnnnnnnnnnnnnnnnnnnnnnnnnnnnnnnnnnnnnnnnnnnnnnnnnnnnnnnnnnnnnnnnnnnnnnnnnnnnnnnnnnnnnnnnnnnnnnnnnnnnnnnnnnnnnnnnnnnnnnnnnnnnnnnnnnnnnnnnnnnnnnnnnnnnnnnnnnnnnnnnnnnnnnnnnnnnnnnnnnnnnnnnnnnnnnnnnnnnnnnnnnnnnnnnnnnnnnnnnnnnnnnnnnnnnnnnnnnnnnnnnnnnnnnnnnnnnnnnnnnnnnnnnnnnnnnnnnnnnnnnnnnnnnnnnnnnnnnnnnnnnnnnnnnnnnnnnnnnnnnnnnnnnnnnnnnnnnnnnnnnnnnnnnnnnnnnnnnnnnnnnnnnnnnnnnnnnnnnnnnnnnnnnnnnnnnnnnnnnnnnnnnnnnnnnnnnnnnnnnnnnnnnnnnnnnnnnnnnnnnnnnnnnnnnnnnnnnnnnnnnnnnnnnnnnnnnnnnnnnnnnnnnnnnnnnnnnnnnnnnnnnnnnnnnnnnnnnnnnnnnnnnnnnnnnnnnnnnnnnnnnnnnnnnnnnnnnnnnnnnnnnnnnnnnnnnnnnnnnnnnnnnnnnnnnnnnnnnnnnnnnnnnnnnnnnnnnnnnnnnnnnnnnnnnnnnnnnnnnnnnnnnnnnnnnnnnnnnnnnnnnnnnnnnnnnnnnnnnnnnnnnnnnnnnnnnnnnnnnnnnnnnnnnnnnnnnnnnnnnnnnnnnnnnnnnnnnnnnnnnnnnnnnnnnnnnnnnnnnnnnnnnnnnnnnnnnnnnnnnnnnnnnnnnnnnnnnnnnnnnnnnnnnnnnnnnnnnnnnnnnnnnnnnnnnnnnnnnnnnnnnnnnnnnnnnnnnnnnnnnnnnnnnnnnnnnnnnnnnnnnnnnnnnnnnnnnnnnnnnnnnnnnnnnnnnnnnnnnnnnnnnnnnnnnnnnnnnnnnnnnnnnnnnnnnnnnnnnnnnnnnnnnnnnnnnnnnnnnnnnnnnnnnnnnnnnnnnnnnnnnnnnnnnnnnnnnnnnnnnnnnnnnnnnnnnnnnnnnnnnnnnnnnnnnnnnnnnnnnnnnnnnnnnnnnnnnnnnnnnnnnnnnnnnnnnnnnnnnnnnnnnnnnnnnnnnnnnnnnnnnnnnnnnnnnnnnnnnnnnnnnnnnnnnnnnnnnnnnnnnnnnnnnnnnnnnnnnnnnnnnnnnnnnnnnnnnnnnnnnnnnnnnnnnnnnnnnnnnnnnnnnnnnnnnnnnnnnnnnnnnnnnnnnnnnnnnnnnnnnnnnnnnnnnnnnnnnnnnnnnnnnnnnnnnnnnnnnnnnnnnnnnnnnnnnnnnnnnnnnnnnnnnnnnnnnnnnnnnnnnnnnnnnnnnnnnnnnnnnnnnnnnnnnnnnnnnnnnnnnnnnnnnnnnnnnnnnnnnnnnnnnnnnnnnnnnnnnnnnnnnnnnnnnnnnnnnnnnnnnnnnnnnnnnnnnnnnnnnnnnnnnnnnnnnnnnnnnnnnnnnnnnnnnnnnnnnnnnnnnnnnnnnnnnnnnnnnnnnnnnnnnnnnnnnnnnnnnnnnnnnnnnnnnnnnnnnnnnnnnnnnnnnnnnnnnnnnnnnnnnnnnnnnnnnnnnnnnnnnnnnnnnnnnnnnnnnnnnnnnnnnnnnnnnnnnnnnnnnnnnnnnnnnnnnnnnnnnnnnnnnnnnnnnnnnnnnnnnnnnnnnnnnnnnnnnnnnnnnnnnnnnnnnnnnnnnnnnnnnnnnnnnnnnnnnnnnnnnnnnnnnnnnnnnnnnnnnnnnnnnnnnnnnnnnnnnnnnnnnnnnnnnnnnnnnnnnnnnnnnnnnnnnnnnnnnnnnnnnnnnnnnnnnnnnnnnnnnnnnnnnnnnnnnnnnnnnnnnnnnnnnnnnnnnnnnnnnnnnnnnnnnnnnnnnnnnnnnnnnnnnnnnnnnnnnnnnnnnnnnnnnnnnnnnnnnnnnnnnnnnnnnnnnnnnnnnnnnnnnnnnnnnnnnnnnnnnnnnnnnnnnnnnnnnnnnnnnnnnnnnnnnnnnnnnnnnnnnnnnnnnnnnnnnnnnnnnnnnnnnnnnnnnnnnnnnnnnnnnnnnnnnnnnnnnnnnnnnnnnnnnnnnnnnnnnnnnnnnnnnnnnnnnnnnnnnnnnnnnnnnnnnnnnnnnnnnnnnnnnnnnnnnnnnnnnnnnnnnnnnnnnnnnnnnnnnnnnnnnnnnnnnnnnnnnnnnnnnnnnnnnnnnnnnnnnnnnnnnnnnnnnnnnnnnnnnnnnnnnnnnnnnnnnnnnnnnnnnnnnnnnnnnnnnnnnnnnnnnnnnnnnnnnnnnnnnnnnnnnnnnnnnnnnnnnnnnnnnnnnnnnnnnnnnnnnnnnnnnnnnnnnnnnnnnnnnnnnnnnnnnnnnnnnnnnnnnnnnnnnnnnnnnnnnnnnnnnnnnnnnnnnnnnnnnnnnnnnnnnnnnnnnnnnnnnnnnnnnnnnnnnnnnnnnnnnnnnnnnnnnnnnnnnnnnnnnnnnnnnnnnnnnnnnnnnnnnnnnnnnnnnnnnnnnnnnnnnnnnnnnnnnnnnnnnnnnnnnnnnnnnnnnnnnnnnnnnnnnnnnnnnnnnnnnnnnnnnnnnnnnnnnnnnnnnnnnnnnnnnnnnnnnnnnnnnnnnnnnnnnnnnnnnnnnnnnnnnnnnnnnnnnnnnnnnnnnnnnnnnnnnnnnnnnnnnnnnnnnnnnnnnnnnnnnnnnnnnnnnnnnnnnnnnnnnnnnnnnnnnnnnnnnnnnnnnnnnnnnnnnnnnnnnnnnnnnnnnnnnnnnnnnnnnnnnnnnnnnnnnnnnnnnnnnnnnnnnnnnnnnnnnnnnnnnnnnnnnnnnnnnnnnnnnnnnnnnnnnnnnnnnnnnnnnnnnnnnnnnnnnnnnnnnnnnnnnnnnnnnnnnnnnnnnnnnnnnnnnnnnnnnnnnnnnnnnnnnnnnnnnnnnnnnnnnnnnnnnnnnnnnnnnnnnnnnnnnnnnnnnnnnnnnnnnnnnnnnnnnnnnnnnnnnnnnnnnnnnnnnnnnnnnnnnnnnnnnnnnnnnnnnnnnnnnnnnnnnnnnnnnnnnnnnnnnnnnnnnnnnnnnnnnnnnnnnnnnnnnnnnnnnnnnnnnnnnnnnnnnnnnnnnnnnnnnnnnnnnnnnnnnnnnnnnnnnnnnnnnnnnnnnnnnnnnnnnnnnnnnnnnnnnnnnnnnnnnnnnnnnnnnnnnnnnnnnnnnnnnnnnnnnnnnnnnnnnnnnnnnnnnnnnnnnnnnnnnnnnnnnnnnnnnnnnnnnnnnnnnnnnnnnnnnnnnnnnnnnnnnnnnnnnnnnnnnnnnnnnnnnnnnnnnnnnnnnnnnnnnnnnnnnnnnnnnnnnnnnnnnnnnnnnnnnnnnnnnnnnnnnnnnnnnnnnnnnnnnnnnnnnnnnnnnnnnnnnnnnnnnnnnnnnnnnnnnnnnnnnnnnnnnnnnnnnnnnnnnnnnnnnnnnnnnnnnnnnnnnnnnnnnnnnnnnnnnnnnnnnnnnnnnnnnnnnnnnnnnnnnnnnnnnnnnnnnnnnnnnnnnnnnnnnnnnnnnnnnnnnnnnnnnnnnnnnnnnnnnnnnnnnnnnnnnnnnnnnnnnnnnnnnnnnnnnnnnnnnnnnnnnnnnnnnnnnnnnnnnnnnnnnnnnnnnnnnnnnnnnnnnnnnnnnnnnnnnnnnnnnnnnnnnnnnnnnnnnnnnnnnnnnnnnnnnnnnnnnnnnnnnnnnnnnnnnnnnnnnnnnnnnnnnnnnnnnnnnnnnnnnnnnnnnnnnnnnnnnnnnnnnnnnnnnnnnnnnnnnnnnnnnnnnnnnnnnnnnnnnnnnnnnnnnnnnnnnnnnnnnnnnnnnnnnnnnnnnnnnnnnnnnnnnnnnnnnnnnnnnnnnnnnnnnnnnnnnnnnnnnnnnnnnnnnnnnnnnnnnnnnnnnnnnnnnnnnnnnnnnnnnnnnnnnnnnnnnnnnnnnnnnnnnnnnnnnnnnnnnnnnnnnnnnnnnnnnnnnnnnnnnnnnnnnnnnnnnnnnnnnnnnnnnnnnnnnnnnnnnnnnnnnnnnnnnnnnnnnnnnnnnnnnnnnnnnnnnnnnnnnnnnnnnnnnnnnnnnnnnnnnnnnnnnnnnnnnnnnnnnnnnnnnnnnnnnnnnnnnnnnnnnnnnnnnnnnnnnnnnnnnnnnnnnnnnnnnnnnnnnnnnnnnnnnnnnnnnnnnnnnnnnnnnnnnnnnnnnnnnnnnnnnnnnnnnnnnnnnnnnnnnnnnnnnnnnnnnnnnnnnnnnnnnnnnnnnnnnnnnnnnnnnnnnnnnnnnnnnnnnnnnnnnnnnnnnnnnnnnnnnnnnnnnnnnnnnnnnnnnnnnnnnnnnnnnnnnnnnnnnnnnnnnnnnnnnnnnnnnnnnnnnnnnnnnnnnnnnnnnnnnnnnnnnnnnnnnnnnnnnnnnnnnnnnnnnnnnnnnnnnnnnnnnnnnnnnnnnnnnnnnnnnnnnnnnnnnnnnnnnnnnnnnnnnnnnnnnnnnnnnnnnnnnnnnnnnnnnnnnnnnnnnnnnnnnnnnnnnnnnnnnnnnnnnnnnnnnnnnnnnnnnnnnnnnnnnnnnnnnnnnnnnnnnnnnnnnnnnnnnnnnnnnnnnnnnnnnnnnnnnnnnnnnnnnnnnnnnnnnnnnnnnnnnnnnnnnnnnnnnnnnnnnnnnnnnnnnnnnnnnnnnnnnnnnnnnnnnnnnnnnnnnnnnnnnnnnnnnnnnnnnnnnnnnnnnnnnnnnnnnnnnnnnnnnnnnnnnnnnnnnnnnnnnnnnnnnnnnnnnnnnnnnnnnnnnnnnnnnnnnnnnnnnnnnnnnnnnnnnnnnnnnnnnnnnnnnnnnnnnnnnnnnnnnnnnnnnnnnnnnnnnnnnnnnnnnnnnnnnnnnnnnnnnnnnnnnnnnnnnnnnnnnnnnnnnnnnnnnnnnnnnnnnnnnnnnnnnnnnnnnnnnnnnnnnnnnnnnnnnnnnnnnnnnnnnnnnnnnnnnnnnnnnnnnnnnnnnnnnnnnnnnnnnnnnnnnnnnnnnnnnnnnnnnnnnnnnnnnnnnnnnnnnnnnnnnnnnnnnnnnnnnnnnnnnnnnnnnnnnnnnnnnnnnnnnnnnnnnnnnnnnnnnnnnnnnnnnnnnnnnnnnnnnnnnnnnnnnnnnnnnnnnnnnnnnnnnnnnnnnnnnnnnnnnnnnnnnnnnnnnnnnnnnnnnnnnnnnnnnnnnnnnnnnnnnnnnnnnnnnnnnnnnnnnnnnnnnnnnnnnnnnnnnnnnnnnnnnnnnnnnnnnnnnnnnnnnnnnnnnnnnnnnnnnnnnnnnnnnnnnnnnnnnnnnnnnnnnnnnnnnnnnnnnnnnnnnnnnnnnnnnnnnnnnnnnnnnnnnnnnnnnnnnnnnnnnnnnnnnnnnnnnnnnnnnnnnnnnnnnnnnnnnnnnnnnnnnnnnnnnnnnnnnnnnnnnnnnnnnnnnnnnnnnnnnnnnnnnnnnnnnnnnnnnnnnnnnnnnnnnnnnnnnnnnnnnnnnnnnnnnnnnnnnnnnnnnnnnnnnnnnnnnnnnnnnnnnnnnnnnnnnnnnnnnnnnnnnnnnnnnnnnnnnnnnnnnnnnnnnnnnnnnnnnnnnnnnnnnnnnnnnnnnnnnnnnnnnnnnnnnnnnnnnnnnnnnnnnnnnnnnnnnnnnnnnnnnnnnnnnnnnnnnnnnnnnnnnnnnnnnnnnnnnnnnnnnnnnnnnnnnnnnnnnnnnnnnnnnnnnnnnnnnnnnnnnnnnnnnnnnnnnnnnnnnnnnnnnnnnnnnnnnnnnnnnnnnnnnnnnnnnnnnnnnnnnnnnnnnnnnnnnnnnnnnnnnnnnnnnnnnnnnnnnnnnnnnnnnnnnnnnnnnnnnnnnnnnnnnnnnnnnnnnnnnnnnnnnnnnnnnnnnnnnnnnnnnnnnnnnnnnnnnnnnnnnnnnnnnnnnnnnnnnnnnnnnnnnnnnnnnnnnnnnnnnnnnnnnnnnnnnnnnnnnnnnnnnnnnnnnnnnnnnnnnnnnnnnnnnnnnnnnnnnnnnnnnnnnnnnnnnnnnnnnnnnnnnnnnnnnnnnnnnnnnnnnnnnnnnnnnnnnnnnnnnnnnnnnnnnnnnnnnnnnnnnnnnnnnnnnnnnnnnnnnnnnnnnnnnnnnnnnnnnnnnnnnnnnnnnnnnnnnnnnnnnnnnnnnnnnnnnnnnnnnnnnnnnnnnnnnnnnnnnnnnnnnnnnnnnnnnnnnnnnnnnnnnnnnnnnnnnnnnnnnnnnnnnnnnnnnnnnnnnnnnnnnnnnnnnnnnnnnnnnnnnnnnnnnnnnnnnnnnnnnnnnnnnnnnnnnnnnnnnnnnnnnnnnnnnnnnnnnnnnnnnnnnnnnnnnnnnnnnnnnnnnnnnnnnnnnnnnnnnnnnnnnnnnnnnnnnnnnnnnnnnnnnnnnnnnnnnnnnnnnnnnnnnnnnnnnnnnnnnnnnnnnnnnnnnnnnnnnnnnnnnnnnnnnnnnnnnnnnnnnnnnnnnnnnnnnnnnnnnnnnnnnnnnnnnnnnnnnnnnnnnnnnnnnnnnnnnnnnnnnnnnnnnnnnnnnnnnnnnnnnnnnnnnnnnnnnnnnnnnnnnnnnnnnnnnnnnnnnnnnnnnnnnnnnnnnnnnnnnnnnnnnnnnnnnnnnnnnnnnnnnnnnnnnnnnnnnnnnnnnnnnnnnnnnnnnnnnnnnnnnnnnnnnnnnnnnnnnnnnnnnnnnnnnnnnnnnnnnnnnnnnnnnnnnnnnnnnnnnnnnnnnnnnnnnnnnnnnnnnnnnnnnnnnnnnnnnnnnnnnnnnnnnnnnnnnnnnnnnnnnnnnnnnnnnnnnnnnnnnnnnnnnnnnnnnnnnnnnnnnnnnnnnnnnnnnnnnnnnnnnnnnnnnnnnnnnnnnnnnnnnnnnnnnnnnnnnnnnnnnnnnnnnnnnnnnnnnnnnnnnnnnnnnnnnnnnnnnnnnnnnnnnnnnnnnnnnnnnnnnnnnnnnnnnnnnnnnnnnnnnnnnnnnnnnnnnnnnnnnnnnnnnnnnnnnnnnnnnnnnnnnnnnnnnnnnnnnnnnnnnnnnnnnnnnnnnnnnnnnnnnnnnnnnnnnnnnnnnnnnnnnnnnnnnnnnnnnnnnnnnnnnnnnnnnnnnnnnnnnnnnnnnnnnnnnnnnnnnnnnnnnnnnnnnnnnnnnnnnnnnnnnnnnnnnnnnnnnnnnnnnnnnnnnnnnnnnnnnnnnnnnnnnnnnnnnnnnnnnnnnnnnnnnnnnnnnnnnnnnnnnnnnnnnnnnnnnnnnnnnnnnnnnnnnnnnnnnnnnnnnnnnnnnnnnnnnnnnnnnnnnnnnnnnnnnnnnnnnnnnnnnnnnnnnnnnnnnnnnnnnnnnnnnnnnnnnnnnnnnnnnnnnnnnnnnnnnnnnnnnnnnnnnnnnnnnnnnnnnnnnnnnnnnnnnnnnnnnnnnnnnnnnnnnnnnnnnnnnnnnnnnnnnnnnnnnnnnnnnnnnnnnnnnnnnnnnnnnnnnnnnnnnnnnnnnnnnnnnnnnnnnnnnnnnnnnnnnnnnnnnnnnnnnnnnnnnnnnnnnnnnnnnnnnnnnnnnnnnnnnnnnnnnnnnnnnnnnnnnnnnnnnnnnnnnnnnnnnnnnnnnnnnnnnnnnnnnnnnnnnnnnnnnnnnnnnnnnnnnnnnnnnnnnnnnnnnnnnnnnnnnnnnnnnnnnnnnnnnnnnnnnnnnnnnnnnnnnnnnnnnnnnnnnnnnnnnnnnnnnnnnnnnnnnnnnnnnnnnnnnnnnnnnnnnnnnnnnnnnnnnnnnnnnnnnnnnnnnnnnnnnnnnnnnnnnnnnnnnnnnnnnnnnnnnnnnnnnnnnnnnnnnnnnnnnnnnnnnnnnnnnnnnnnnnnnnnnnnnnnnnnnnnnnnnnnnnnnnnnnnnnnnnnnnnnnnnnnnnnnnnnnnnnnnnnnnnnnnnnnnnnnnnnnnnnnnnnnnnnnnnnnnnnnnnnnnnnnnnnnnnnnnnnnnnnnnnnnnnnnnnnnnnnnnnnnnnnnnnnnnnnnnnnnnnnnnnnnnnnnnnnnnnnnnnnnnnnnnnnnnnnnnnnnnnnnnnnnnnnnnnnnnnnnnnnnnnnnnnnnnnnnnnnnnnnnnnnnnnnnnnnnnnnnnnnnnnnnnnnnnnnnnnnnnnnnnnnnnnnnnnnnnnnnnnnnnnnnnnnnnnnnnnnnnnnnnnnnnnnnnnnnnnnnnnnnnnnnnnnnnnnnnnnnnnnnnnnnnnnnnnnnnnnnnnnnnnnnnnnnnnnnnnnnnnnnnnnnnnnnnnnnnnnnnnnnnnnnnnnnnnnnnnnnnnnnnnnnnnnnnnnnnnnnnnnnnnnnnnnnnnnnnnnnnnnnnnnnnnnnnnnnnnnnnnnnnnnnnnnnnnnnnnnnnnnnnnnnnnnnnnnnnnnnnnnnnnnnnnnnnnnnnnnnnnnnnnnnnnnnnnnnnnnnnnnnnnnnnnnnnnnnnnnnnnnnnnnnnnnnnnnnnnnnnnnnnnnnnnnnnnnnnnnnnnnnnnnnnnnnnnnnnnnnnnnnnnnnnnnnnnnnnnnnnnnnnnnnnnnnnnnnnnnnnnnnnnnnnnnnnnnnnnnnnnnnnnnnnnnnnnnnnnnnnnnnnnnnnnnnnnnnnnnnnnnnnnnnnnnnnnnnnnnnnnnnnnnnnnnnnnnnnnnnnnnnnnnnnnnnnnnnnnnnnnnnnnnnnnnnnnnnnnnnnnnnnnnnnnnnnnnnnnnnnnnnnnnnnnnnnnnnnnnnnnnnnnnnnnnnnnnnnnnnnnnnnnnnnnnnnnnnnnnnnnnnnnnnnnnnnnnnnnnnnnnnnnnnnnnnnnnnnnnnnnnnnnnnnnnnnnnnnnnnnnnnnnnnnnnnnnnnnnnnnnnnnnnnnnnnnnnnnnnnnnnnnnnnnnnnnnnnnnnnnnnnnnnnnnnnnnnnnnnnnnnnnnnnnnnnnnnnnnnnnnnnnnnnnnnnnnnnnnnnnnnnnnnnnnnnnnnnnnnnnnnnnnnnnnnnnnnnnnnnnnnnnnnnnnnnnnnnnnnnnnnnnnnnnnnnnnnnnnnnnnnnnnnnnnnnnnnnnnnnnnnnnnnnnnnnnnnnnnnnnnnnnnnnnnnnnnnnnnnnnnnnnnnnnnnnnnnnnnnnnnnnnnnnnnnnnnnnnnnnnnnnnnnnnnnnnnnnnnnnnnnnnnnnnnnnnnnnnnnnnnnnnnnnnnnnnnnnnnnnnnnnnnnnnnnnnnnnnnnnnnnnnnnnnnnnnnnnnnnnnnnnnnnnnnnnnnnnnnnnnnnnnnnnnnnnnnnnnnnnnnnnnnnnnnnnnnnnnnnnnnnnnnnnnnnnnnnnnnnnnnnnnnnnnnnnnnnnnnnnnnnnnnnnnnnnnnnnnnnnnnnnnnnnnnnnnnnnnnnnnnnnnnnnnnnnnnnnnnnnnnnnnnnnnnnnnnnnnnnnnnnnnnnnnnnnnnnnnnnnnnnnnnnnnnnnnnnnnnnnnnnnnnnnnnnnnnnnnnnnnnnnnnnnnnnnnnnnnnnnnnnnnnnnnnnnnnnnnnnnnnnnnnnnnnnnnnnnnnnnnnnnnnnnnnnnnnnnnnnnnnnnnnnnnnnnnnnnnnnnnnnnnnnnnnnnnnnnnnnnnnnnnnnnnnnnnnnnnnnnnnnnnnnnnnnnnnnnnnnnnnnnnnnnnnnnnnnnnnnnnnnnnnnnnnnnnnnnnnnnnnnnnnnnnnnnnnnnnnnnnnnnnnnnnnnnnnnnnnnnnnnnnnnnnnnnnnnnnnnnnnnnnnnnnnnnnnnnnnnnnnnnnnnnnnnnnnnnnnnnnnnnnnnnnnnnnnnnnnnnnnnnnnnnnnnnnnnnnnnnnnnnnnnnnnnnnnnnnnnnnnnnnnnnnnnnnnnnnnnnnnnnnnnnnnnnnnnnnnnnnnnnnnnnnnnnnnnnnnnnnnnnnnnnnnnnnnnnnnnnnnnnnnnnnnnnnnnnnnnnnnnnnnnnnnnnnnnnnnnnnnnnnnnnnnnnnnnnnnnnnnnnnnnnnnnnnnnnnnnnnnnnnnnnnnnnnnnnnnnnnnnnnnnnnnnnnnnnnnnnnnnnnnnnnnnnnnnnnnnnnnnnnnnnnnnnnnnnnnnnnnnnnnnnnnnnnnnnnnnnnnnnnnnnnnnnnnnnnnnnnnnnnnnnnnnnnnnnnnnnnnnnnnnnnnnnnnnnnnnnnnnnnnnnnnnnnnnnnnnnnnnnnnnnnnnnnnnnnnnnnnnnnnnnnnnnnnnnnnnnnnnnnnnnnnnnnnnnnnnnnnnnnnnnnnnnnnnnnnnnnnnnnnnnnnnnnnnnnnnnnnnnnnnnnnnnnnnnnnnnnnnnnnnnnnnnnnnnnnnnnnnnnnnnnnnnnnnnnnnnnnnnnnnnnnnnnnnnnnnnnnnnnnnnnnnnnnnnnnnnnnnnnnnnnnnnnnnnnnnnnnnnnnnnnnnnnnnnnnnnnnnnnnnnnnnnnnnnnnnnnnnnnnnnnnnnnnnnnnnnnnnnnnnnnnnnnnnnnnnnnnnnnnnnnnnnnnnnnnnnnnnnnnnnnnnnnnnnnnnnnnnnnnnnnnnnnnnnnnnnnnnnnnnnnnnnnnnnnnnnnnnnnnnnnnnnnnnnnnnnnnnnnnnnnnnnnnnnnnnnnnnnnnnnnnnnnnnnnnnnnnnnnnnnnnnnnnnnnnnnnnnnnnnnnnnnnnnnnnnnnnnnnnnnnnnnnnnnnnnnnnnnnnnnnnnnnnnnnnnnnnnnnnnnnnnnnnnnnnnnnnnnnnnnnnnnnnnnnnnnnnnnnnnnnnnnnnnnnnnnnnnnnnnnnnnnnnnnnnnnnnnnnnnnnnnnnnnnnnnnnnnnnnnnnnnnnnnnnnnnnnnnnnnnnnnnnnnnnnnnnnnnnnnnnnnnnnnnnnnnnnnnnnnnnnnnnnnnnnnnnnnnnnnnnnnnnnnnnnnnnnnnnnnnnnnnnnnnnnnnnnnnnnnnnnnnnnnnnnnnnnnnnnnnnnnnnnnnnnnnnnnnnnnnnnnnnnnnnnnnnnnnnnnnnnnnnnnnnnnnnnnnnnnnnnnnnnnnnnnnnnnnnnnnnnnnnnnnnnnnnnnnnnnnnnnnnnnnnnnnnnnnnnnnnnnnnnnnnnnnnnnnnnnnnnnnnnnnnnnnnnnnnnnnnnnnnnnnnnnnnnnnnnnnnnnnnnnnnnnnnnnnnnnnnnnnnnnnnnnnnnnnnnnnnnnnnnnnnnnnnnnnnnnnnnnnnnnnnnnnnnnnnnnnnnnnnnnnnnnnnnnnnnnnnnnnnnnnnnnnnnnnnnnnnnnnnnnnnnnnnnnnnnnnnnnnnnnnnnnnnnnnnnnnnnnnnnnnnnnnnnnnnnnnnnnnnnnnnnnnnnnnnnnnnnnnnnnnnnnnnnnnnnnnnnnnnnnnnnnnnnnnnnnnnnnnnnnnnnnnnnnnnnnnnnnnnnnnnnnnnnnnnnnnnnnnnnnnnnnnnnnnnnnnnnnnnnnnnnnnnnnnnnnnnnnnnnnnnnnnnnnnnnnnnnnnnnnnnnnnnnnnnnnnnnnnnnnnnnnnnnnnnnnnnnnnnnnnnnnnnnnnnnnnnnnnnnnnnnnnnnnnnnnnnnnnnnnnnnnnnnnnnnnnnnnnnnnnnnnnnnnnnnnnnnnnnnnnnnnnnnnnnnnnnnnnnnnnnnnnnnnnnnnnnnnnnnnnnnnnnnnnnnnnnnnnnnnnnnnnnnnnnnnnnnnnnnnnnnnnnnnnnnnnnnnnnnnnnnnnnnnnnnnnnnnnnnnnnnnnnnnnnnnnnnnnnnnnnnnnnnnnnnnnnnnnnnnnnnnnnnnnnnnnnnnnnnnnnnnnnnnnnnnnnnnnnnnnnnnnnnnnnnnnnnnnnnnnnnnnnnnnnnnnnnnnnnnnnnnnnnnnnnnnnnnnnnnnnnnnnnnnnnnnnnnnnnnnnnnnnnnnnnnnnnnnnnnnnnnnnnnnnnnnnnnnnnnnnnnnnnnnnnnnnnnnnnnnnnnnnnnnnnnnnnnnnnnnnnnnnnnnnnnnnnnnnnnnnnnnnnnnnnnnnnnnnnnnnnnnnnnnnnnnnnnnnnnnnnnnnnnnnnnnnnnnnnnnnnnnnnnnnnnnnnnnnnnnnnnnnnnnnnnnnnnnnnnnnnnnnnnnnnnnnnnnnnnnnnnnnnnnnnnnnnnnnnnnnnnnnnnnnnnnnnnnnnnnnnnnnnnnnnnnnnnnnnnnnnnnnnnnnnnnnnnnnnnnnnnnnnnnnnnnnnnnnnnnnnnnnnnnnnnnnnnnnnnnnnnnnnnnnnnnnnnnnnnnnnnnnnnnnnnnnnnnnnnnnnnnnnnnnnnnnnnnnnnnnnnnnnnnnnnnnnnnnnnnnnnnnnnnnnnnnnnnnnnnnnnnnnnnnnnnnnnnnnnnnnnnnnnnnnnnnnnnnnnnnnnnnnnnnnnnnnnnnnnnnnnnnnnnnnnnnnnnnnnnnnnnnnnnnnnnnnnnnnnnnnnnnnnnnnnnnnnnnnnnnnnnnnnnnnnnnnnnnnnnnnnnnnnnnnnnnnnnnnnnnnnnnnnnnnnnnnnnnnnnnnnnnnnnnnnnnnnnnnnnnnnnnnnnnnnnnnnnnnnnnnnnnnnnnnnnnnnnnnnnnnnnnnnnnnnnnnnnnnnnnnnnnnnnnnnnnnnnnnnnnnnnnnnnnnnnnnnnnnnnnnnnnnnnnnnnnnnnnnnnnnnnnnnnnnnnnnnnnnnnnnnnnnnnnnnnnnnnnnnnnnnnnnnnnnnnnnnnnnnnnnnnnnnnnnnnnnnnnnnnnnnnnnnnnnnnnnnnnnnnnnnnnnnnnnnnnnnnnnnnnnnnnnnnnnnnnnnnnnnnnnnnnnnnnnnnnnnnnnnnnnnnnnnnnnnnnnnnnnnnnnnnnnnnnnnnnnnnnnnnnnnnnnnnnnnnnnnnnnnnnnnnnnnnnnnnnnnnnnnnnnnnnnnnnnnnnnnnnnnnnnnnnnnnnnnnnnnnnnnnnnnnnnnnnnnnnnnnnnnnnnnnnnnnnnnnnnnnnnnnnnnnnnnnnnnnnnnnnnnnnnnnnnnnnnnnnnnnnnnnnnnnnnnnnnnnnnnnnnnnnnnnnnnnnnnnnnnnnnnnnnnnnnnnnnnnnnnnnnnnnnnnnnnnnnnnnnnnnnnnnnnnnnnnnnnnnnnnnnnnnnnnnnnnnnnnnnnnnnnnnnnnnnnnnnnnnnnnnnnnnnnnnnnnnnnnnnnnnnnnnnnnnnnnnnnnnnnnnnnnnnnnnnnnnnnnnnnnnnnnnnnnnnnnnnnnnnnnnnnnnnnnnnnnnnnnnnnnnnnnnnnnnnnnnnnnnnnnnnnnnnnnnnnnnnnnnnnnnnnnnnnnnnnnnnnnnnnnnnnnnnnnnnnnnnnnnnnnnnnnnnnnnnnnnnnnnnnnnnnnnnnnnnnnnnnnnnnnnnnnnnnnnnnnnnnnnnnnnnnnnnnnnnnnnnnnnnnnnnnnnnnnnnnnnnnnnnnnnnnnnnnnnnnnnnnnnnnnnnnnnnnnnnnnnnnnnnnnnnnnnnnnnnnnnnnnnnnnnnnnnnnnnnnnnnnnnnnnnnnnnnnnnnnnnnnnnnnnnnnnnnnnnnnnnnnnnnnnnnnnnnnnnnnnnnnnnnnnnnnnnnnnnnnnnnnnnnnnnnnnnnnnnnnnnnnnnnnnnnnnnnnnnnnnnnnnnnnnnnnnnnnnnnnnnnnnnnnnnnnnnnnnnnnnnnnnnnnnnnnnnnnnnnnnnnnnnnnnnnnnnnnnnnnnnnnnnnnnnnnnnnnnnnnnnnnnnnnnnnnnnnnnnnnnnnnnnnnnnnnnnnnnnnnnnnnnnnnnnnnnnnnnnnnnnnnnnnnnnnnnnnnnnnnnnnnnnnnnnnnnnnnnnnnnnnnnnnnnnnnnnnnnnnnnnnnnnnnnnnnnnnnnnnnnnnnnnnnnnnnnnnnnnnnnnnnnnnnnnnnnnnnnnnnnnnnnnnnnnnnnnnnnnnnnnnnnnnnnnnnnnnnnnnnnnnnnnnnnnnnnnnnnnnnnnnnnnnnnnnnnnnnnnnnnnnnnnnnnnnnnnnnnnnnnnnnnnnnnnnnnnnnnnnnnnnnnnnnnnnnnnnnnnnnnnnnnnnnnnnnnnnnnnnnnnnnnnnnnnnnnnnnnnnnnnnnnnnnnnnnnnnnnnnnnnnnnnnnnnnnnnnnnnnnnnnnnnnnnnnnnnnnnnnnnnnnnnnnnnnnnnnnnnnnnnnnnnnnnnnnnnnnnnnnnnnnnnnnnnnnnnnnnnnnnnnnnnnnnnnnnnnnnnnnnnnnnnnnnnnnnnnnnnnnnnnnnnnnnnnnnnnnnnnnnnnnnnnnnnnnnnnnnnnnnnnnnnnnnnnnnnnnnnnnnnnnnnnnnnnnnnnnnnnnnnnnnnnnnnnnnnnnnnnnnnnnnnnnnnnnnnnnnnnnnnnnnnnnnnnnnnnnnnnnnnnnnnnnnnnnnnnnnnnnnnnnnnnnnnnnnnnnnnnnnnnnnnnnnnnnnnnnnnnnnnnnnnnnnnnnnnnnnnnnnnnnnnnnnnnnnnnnnnnnnnnnnnnnnnnnnnnnnnnnnnnnnnnnnnnnnnnnnnnnnnnnnnnnnnnnnnnnnnnnnnnnnnnnnnnnnnnnnnnnnnnnnnnnnnnnnnnnnnnnnnnnnnnnnnnnnnnnnnnnnnnnnnnnnnnnnnnnnnnnnnnnnnnnnnnnnnnnnnnnnnnnnnnnnnnnnnnnnnnnnnnnnnnnnnnnnnnnnnnnnnnnnnnnnnnnnnnnnnnnnnnnnnnnnnnnnnnnnnnnnnnnnnnnnnnnnnnnnnnnnnnnnnnnnnnnnnnnnnnnnnnnnnnnnnnnnnnnnnnnnnnnnnnnnnnnnnnnnnnnnnnnnnnnnnnnnnnnnnnnnnnnnnnnnnnnnnnnnnnnnnnnnnnnnnnnnnnnnnnnnnnnnnnnnnnnnnnnnnnnnnnnnnnnnnnnnnnnnnnnnnnnnnnnnnnnnnnnnnnnnnnnnnnnnnnnnnnnnnnnnnnnnnnnnnnnnnnnnnnnnnnnnnnnnnnnnnnnnnnnnnnnnnnnnnnnnnnnnnnnnnnnnnnnnnnnnnnnnnnnnnnnnnnnnnnnnnnnnnnnnnnnnnnnnnnnnnnnnnnnnnnnnnnnnnnnnnnnnnnnnnnnnnnnnnnnnnnnnnnnnnnnnnnnnnnnnnnnnnnnnnnnnnnnnnnnnnnnnnnnnnnnnnnnnnnnnnnnnnnnnnnnnnnnnnnnnnnnnnnnnnnnnnnnnnnnnnnnnnnnnnnnnnnnnnnnnnnnnnnnnnnnnnnnnnnnnnnnnnnnnnnnnnnnnnnnnnnnnnnnnnnnnnnnnnnnnnnnnnnnnnnnnnnnnnnnnnnnnnnnnnnnnnnnnnnnnnnnnnnnnnnnnnnnnnnnnnnnnnnnnnnnnnnnnnnnnnnnnnnnnnnnnnnnnnnnnnnnnnnnnnnnnnnnnnnnnnnnnnnnnnnnnnnnnnnnnnnnnnnnnnnnnnnnnnnnnnnnnnnnnnnnnnnnnnnnnnnnnnnnnnnnnnnnnnnnnnnnnnnnnnnnnnnnnnnnnnnnnnnnnnnnnnnnnnnnnnnnnnnnnnnnnnnnnnnnnnnnnnnnnnnnnnnnnnnnnnnnnnnnnnnnnnnnnnnnnnnnnnnnnnnnnnnnnnnnnnnnnnnnnnnnnnnnnnnnnnnnnnnnnnnnnnnnnnnnnnnnnnnnnnnnnnnnnnnnnnnnnnnnnnnnnnnnnnnnnnnnnnnnnnnnnnnnnnnnnnnnnnnnnnnnnnnnnnnnnnnnnnnnnnnnnnnnnnnnnnnnnnnnnnnnnnnnnnnnnnnnnnnnnnnnnnnnnnnnnnnnnnnnnnnnnnnnnnnnnnnnnnnnnnnnnnnnnnnnnnnnnnnnnnnnnnnnnnnnnnnnnnnnnnnnnnnnnnnnnnnnnnnnnnnnnnnnnnnnnnnnnnnnnnnnnnnnnnnnnnnnnnnnnnnnnnnnnnnnnnnnnnnnnnnnnnnnnnnnnnnnnnnnnnnnnnnnnnnnnnnnnnnnnnnnnnnnnnnnnnnnnnnnnnnnnnnnnnnnnnnnnnnnnnnnnnnnnnnnnnnnnnnnnnnnnnnnnnnnnnnnnnnnnnnnnnnnnnnnnnnnnnnnnnnnnnnnnnnnnnnnnnnnnnnnnnnnnnnnnnnnnnnnnnnnnnnnnnnnnnnnnnnnnnnnnnnnnnnnnnnnnnnnnnnnnnnnnnnnnnnnnnnnnnnnnnnnnnnnnnnnnnnnnnnnnnnnnnnnnnnnnnnnnnnnnnnnnnnnnnnnnnnnnnnnnnnnnnnnnnnnnnnnnnnnnnnnnnnnnnnnnnnnnnnnnnnnnnnnnnnnnnnnnnnnnnnnnnnnnnnnnnnnnnnnnnnnnnnnnnnnnnnnnnnnnnnnnnnnnnnnnnnnnnnnnnnnnnnnnnnnnnnnnnnnnnnnnnnnnnnnnnnnnnnnnnnnnnnnnnnnnnnnnnnnnnnnnnnnnnnnnnnnnnnnnnnnnnnnnnnnnnnnnnnnnnnnnnnnnnnnnnnnnnnnnnnnnnnnnnnnnnnnnnnnnnnnnnnnnnnnnnnnnnnnnnnnnnnnnnnnnnnnnnnnnnnnnnnnnnnnnnnnnnnnnnnnnnnnnnnnnnnnnnnnnnnnnnnnnnnnnnnnnnnnnnnnnnnnnnnnnnnnnnnnnnnnnnnnnnnnnnnnnnnnnnnnnnnnnnnnnnnnnnnnnnnnnnnnnnnnnnnnnnnnnnnnnnnnnnnnnnnnnnnnnnnnnnnnnnnnnnnnnnnnnnnnnnnnnnnnnnnnnnnnnnnnnnnnnnnnnnnnnnnnnnnnnnnnnnnnnnnnnnnnnnnnnnnnnnnnnnnnnnnnnnnnnnnnnnnnnnnnnnnnnnnnnnnnnnnnnnnnnnnnnnnnnnnnnnnnnnnnnnnnnnnnnnnnnnnnnnnnnnnnnnnnnnnnnnnnnnnnnnnnnnnnnnnnnnnnnnnnnnnnnnnnnnnnnnnnnnnnnnnnnnnnnnnnnnnnnnnnnnnnnnnnnnnnnnnnnnnnnnnnnnnnnnnnnnnnnnnnnnnnnnnnnnnnnnnnnnnnnnnnnnnnnnnnnnnnnnnnnnnnnnnnnnnnnnnnnnnnnnnnnnnnnnnnnnnnnnnnnnnnnnnnnnnnnnnnnnnnnnnnnnnnnnnnnnnnnnnnnnnnnnnnnnnnnnnnnnnnnnnnnnnnnnnnnnnnnnnnnnnnnnnnnnnnnnnnnnnnnnnnnnnnnnnnnnnnnnnnnnnnnnnnnnnnnnnnnnnnnnnnnnnnnnnnnnnnnnnnnnnnnnnnnnnnnnnnnnnnnnnnnnnnnnnnnnnnnnnnnnnnnnnnnnnnnnnnnnnnnnnnnnnnnnnnnnnnnnnnnnnnnnnnnnnnnnnnnnnnnnnnnnnnnnnnnnnnnnnnnnnnnnnnnnnnnnnnnnnnnnnnnnnnnnnnnnnnnnnnnnnnnnnnnnnnnnnnnnnnnnnnnnnnnnnnnnnnnnnnnnnnnnnnnnnnnnnnnnnnnnnnnnnnnnnnnnnnnnnnnnnnnnnnnnnnnnnnnnnnnnnnnnnnnnnnnnnnnnnnnnnnnnnnnnnnnnnnnnnnnnnnnnnnnnnnnnnnnnnnnnnnnnnnnnnnnnnnnnnnnnnnnnnnnnnnnnnnnnnnnnnnnnnnnnnnnnnnnnnnnnnnnnnnnnnnnnnnnnnnnnnnnnnnnnnnnnnnnnnnnnnnnnnnnnnnnnnnnnnnnnnnnnnnnnnnnnnnnnnnnnnnnnnnnnnnnnnnnnnnnnnnnnnnnnnnnnnnnnnnnnnnnnnnnnnnnnnnnnnnnnnnnnnnnnnnnnnnnnnnnnnnnnnnnnnnnnnnnnnnnnnnnnnnnnnnnnnnnnnnnnnnnnnnnnnnnnnnnnnnnnnnnnnnnnnnnnnnnnnnnnnnnnnnnnnnnnnnnnnnnnnnnnnnnnnnnnnnnnnnnnnnnnnnnnnnnnnnnnnnnnnnnnnnnnnnnnnnnnnnnnnnnnnnnnnnnnnnnnnnnnnnnnnnnnnnnnnnnnnnnnnnnnnnnnnnnnnnnnnnnnnnnnnnnnnnnnnnnnnnnnnnnnnnnnnnnnnnnnnnnnnnnnnnnnnnnnnnnnnnnnnnnnnnnnnnnnnnnnnnnnnnnnnnnnnnnnnnnnnnnnnnnnnnnnnnnnnnnnnnnnnnnnnnnnnnnnnnnnnnnnnnnnnnnnnnnnnnnnnnnnnnnnnnnnnnnnnnnnnnnnnnnnnnnnnnnnnnnnnnnnnnnnnnnnnnnnnnnnnnnnnnnnnnnnnnnnnnnnnnnnnnnnnnnnnnnnnnnnnnnnnnnnnnnnnnnnnnnnnnnnnnnnnnnnnnnnnnnnnnnnnnnnnnnnnnnnnnnnnnnnnnnnnnnnnnnnnnnnnnnnnnnnnnnnnnnnnnnnnnnnnnnnnnnnnnnnnnnnnnnnnnnnnnnnnnnnnnnnnnnnnnnnnnnnnnnnnnnnnnnnnnnnnnnnnnnnnnnnnnnnnnnnnnnnnnnnnnnnnnnnnnnnnnnnnnnnnnnnnnnnnnnnnnnnnnnnnnnnnnnnnnnnnnnnnnnnnnnnnnnnnnnnnnnnnnnnnnnnnnnnnnnnnnnnnnnnnnnnnnnnnnnnnnnnnnnnnnnnnnnnnnnnnnnnnnnnnnnnnnnnnnnnnnnnnnnnnnnnnnnnnnnnnnnnnnnnnnnnnnnnnnnnnnnnnnnnnnnnnnnnnnnnnnnnnnnnnnnnnnnnnnnnnnnnnnnnnnnnnnnnnnnnnnnnnnnnnnnnnnnnnnnnnnnnnnnnnnnnnnnnnnnnnnnnnnnnnnnnnnnnnnnnnnnnnnnnnnnnnnnnnnnnnnnnnnnnnnnnnnnnnnnnnnnnnnnnnnnnnnnnnnnnnnnnnnnnnnnnnnnnnnnnnnnnnnnnnnnnnnnnnnnnnnnnnnnnnnnnnnnnnnnnnnnnnnnnnnnnnnnnnnnnnnnnnnnnnnnnnnnnnnnnnnnnnnnnnnnnnnnnnnnnnnnnnnnnnnnnnnnnnnnnnnnnnnnnnnnnnnnnnnnnnnnnnnnnnnnnnnnnnnnnnnnnnnnnnnnnnnnnnnnnnnnnnnnnnnnnnnnnnnnnnnnnnnnnnnnnnnnnnnnnnnnnnnnnnnnnnnnnnnnnnnnnnnnnnnnnnnnnnnnnnnnnnnnnnnnnnnnnnnnnnnnnnnnnnnnnnnnnnnnnnnnnnnnnnnnnnnnnnnnnnnnnnnnnnnnnnnnnnnnnnnnnnnnnnnnnnnnnnnnnnnnnnnnnnnnnnnnnnnnnnnnnnnnnnnnnnnnnnnnnnnnnnnnnnnnnnnnnnnnnnnnnnnnnnnnnnnnnnnnnnnnnnnnnnnnnnnnnnnnnnnnnnnnnnnnnnnnnnnnnnnnnnnnnnnnnnnnnnnnnnnnnnnnnnnnnnnnnnnnnnnnnnnnnnnnnnnnnnnnnnnnnnnnnnnnnnnnnnnnnnnnnnnnnnnnnnnnnnnnnnnnnnnnnnnnnnnnnnnnnnnnnnnnnnnnnnnnnnnnnnnnnnnnnnnnnnnnnnnnnnnnnnnnnnnnnnnnnnnnnnnnnnnnnnnnnnnnnnnnnnnnnnnnnnnnnnnnnnnnnnnnnnnnnnnnnnnnnnnnnnnnnnnnnnnnnnnnnnnnnnnnnnnnnnnnnnnnnnnnnnnnnnnnnnnnnnnnnnnnnnnnnnnnnnnnnnnnnnnnnnnnnnnnnnnnnnnnnnnnnnnnnnnnnnnnnnnnnnnnnnnnnnnnnnnnnnnnnnnnnnnnnnnnnnnnnnnnnnnnnnnnnnnnnnnnnnnnnnnnnnnnnnnnnnnnnnnnnnnnnnnnnnnnnnnnnnnnnnnnnnnnnnnnnnnnnnnnnnnnnnnnnnnnnnnnnnnnnnnnnnnnnnnnnnnnnnnnnnnnnnnnnnnnnnnnnnnnnnnnnnnnnnnnnnnnnnnnnnnnnnnnnnnnnnnnnnnnnnnnnnnnnnnnnnnnnnnnnnnnnnnnnnnnnnnnnnnnnnnnnnnnnnnnnnnnnnnnnnnnnnnnnnnnnnnnnnnnnnnnnnnnnnnnnnnnnnnnnnnnnnnnnnnnnnnnnnnnnnnnnnnnnnnnnnnnnnnnnnnnnnnnnnnnnnnnnnnnnnnnnnnnnnnnnnnnnnnnnnnnnnnnnnnnnnnnnnnnnnnnnnnnnnnnnnnnnnnnnnnnnnnnnnnnnnnnnnnnnnnnnnnnnnnnnnnnnnnnnnnnnnnnnnnnnnnnnnnnnnnnnnnnnnnnnnnnnnnnnnnnnnnnnnnnnnnnnnnnnnnnnnnnnnnnnnnnnnnnnnnnnnnnnnnnnnnnnnnnnnnnnnnnnnnnnnnnnnnnnnnnnnnnnnnnnnnnnnnnnnnnnnnnnnnnnnnnnnnnnnnnnnnnnnnnnnnnnnnnnnnnnnnnnnnnnnnnnnnnnnnnnnnnnnnnnnnnnnnnnnnnnnnnnnnnnnnnnnnnnnnnnnnnnnnnnnnnnnnnnnnnnnnnnnnnnnnnnnnnnnnnnnnnnnnnnnnnnnnnnnnnnnnnnnnnnnnnnnnnnnnnnnnnnnnnnnnnnnnnnnnnnnnnnnnnnnnnnnnnnnnnnnnnnnnnnnnnnnnnnnnnnnnnnnnnnnnnnnnnnnnnnnnnnnnnnnnnnnnnnnnnnnnnnnnnnnnnnnnnnnnnnnnnnnnnnnnnnnnnnnnnnnnnnnnnnnnnnnnnnnnnnnnnnnnnnnnnnnnnnnnnnnnnnnnnnnnnnnnnnnnnnnnnnnnnnnnnnnnnnnnnnnnnnnnnnnnnnnnnnnnnnnnnnnnnnnnnnnnnnnnnnnnnnnnnnnnnnnnnnnnnnnnnnnnnnnnnnnnnnnnnnnnnnnnnnnnnnnnnnnnnnnnnnnnnnnnnnnnnnnnnnnnnnnnnnnnnnnnnnnnnnnnnnnnnnnnnnnnnnnnnnnnnnnnnnnnnnnnnnnnnnnnnnnnnnnnnnnnnnnnnnnnnnnnnnnnnnnnnnnnnnnnnnnnnnnnnnnnnnnnnnnnnnnnnnnnnnnnnnnnnnnnnnnnnnnnnnnnnnnnnnnnnnnnnnnnnnnnnnnnnnnnnnnnnnnnnnnnnnnnnnnnnnnnnnnnnnnnnnnnnnnnnnnnnnnnnnnnnnnnnnnnnnnnnnnnnnnnnnnnnnnnnnnnnnnnnnnnnnnnnnnnnnnnnnnnnnnnnnnnnnnnnnnnnnnnnnnnnnnnnnnnnnnnnnnnnnnnnnnnnnnnnnnnnnnnnnnnnnnnnnnnnnnnnnnnnnnnnnnnnnnnnnnnnnnnnnnnnnnnnnnnnnnnnnnnnnnnnnnnnnnnnnnnnnnnnnnnnnnnnnnnnnnnnnnnnnnnnnnnnnnnnnnnnnnnnnnnnnnnnnnnnnnnnnnnnnnnnnnnnnnnnnnnnnnnnnnnnnnnnnnnnnnnnnnnnnnnnnnnnnnnnnnnnnnnnnnnnnnnnnnnnnnnnnnnnnnnnnnnnnnnnnnnnnnnnnnnnnnnnnnnnnnnnnnnnnnnnnnnnnnnnnnnnnnnnnnnnnnnnnnnnnnnnnnnnnnnnnnnnnnnnnnnnnnnnnnnnnnnnnnnnnnnnnnnnnnnnnnnnnnnnnnnnnnnnnnnnnnnnnnnnnnnnnnnnnnnnnnnnnnnnnnnnnnnnnnnnnnnnnnnnnnnnnnnnnnnnnnnnnnnnnnnnnnnnnnnnnnnnnnnnnnnnnnnnnnnnnnnnnnnnnnnnnnnnnnnnnnnnnnnnnnnnnnnnnnnnnnnnnnnnnnnnnnnnnnnnnnnnnnnnnnnnnnnnnnnnnnnnnnnnnnnnnnnnnnnnnnnnnnnnnnnnnnnnnnnnnnnnnnnnnnnnnnnnnnnnnnnnnnnnnnnnnnnnnnnnnnnnnnnnnnnnnnnnnnnnnnnnnnnnnnnnnnnnnnnnnnnnnnnnnnnnnnnnnnnnnnnnnnnnnnnnnnnnnnnnnnnnnnnnnnnnnnnnnnnnnnnnnnnnnnnnnnnnnnnnnnnnnnnnnnnnnnnnnnnnnnnnnnnnnnnnnnnnnnnnnnnnnnnnnnnnnnnnnnnnnnnnnnnnnnnnnnnnnnnnnnnnnnnnnnnnnnnnnnnnnnnnnnnnnnnnnnnnnnnnnnnnnnnnnnnnnnnnnnnnnnnnnnnnnnnnnnnnnnnnnnnnnnnnnnnnnnnnnnnnnnnnnnnnnnnnnnnnnnnnnnnnnnnnnnnnnnnnnnnnnnnnnnnnnnnnnnnnnnnnnnnnnnnnnnnnnnnnnnnnnnnnnnnnnnnnnnnnnnnnnnnnnnnnnnnnnnnnnnnnnnnnnnnnnnnnnnnnnnnnnnnnnnnnnnnnnnnnnnnnnnnnnnnnnnnnnnnnnnnnnnnnnnnnnnnnnnnnnnnnnnnnnnnnnnnnnnnnnnnnnnnnnnnnnnnnnnnnnnnnnnnnnnnnnnnnnnnnnnnnnnnnnnnnnnnnnnnnnnnnnnnnnnnnnnnnnnnnnnnnnnnnnnnnnnnnnnnnnnnnnnnnnnnnnnnnnnnnnnnnnnnnnnnnnnnnnnnnnnnnnnnnnnnnnnnnnnnnnnnnnnnnnnnnnnnnnnnnnnnnnnnnnnnnnnnnnnnnnnnnnnnnnnnnnnnnnnnnnnnnnnnnnnnnnnnnnnnnnnnnnnnnnnnnnnnnnnnnnnnnnnnnnnnnnnnnnnnnnnnnnnnnnnnnnnnnnnnnnnnnnnnnnnnnnnnnnnnnnnnnnnnnnnnnnnnnnnnnnnnnnnnnnnnnnnnnnnnnnnnnnnnnnnnnnnnnnnnnnnnnnnnnnnnnnnnnnnnnnnnnnnnnnnnnnnnnnnnnnnnnnnnnnnnnnnnnnnnnnnnnnnnnnnnnnnnnnnnnnnnnnnnnnnnnnnnnnnnnnnnnnnnnnnnnnnnnnnnnnnnnnnnnnnnnnnnnnnnnnnnnnnnnnnnnnnnnnnnnnnnnnnnnnnnnnnnnnnnnnnnnnnnnnnnnnnnnnnnnnnnnnnnnnnnnnnnnnnnnnnnnnnnnnnnnnnnnnnnnnnnnnnnnnnnnnnnnnnnnnnnnnnnnnnnnnnnnnnnnnnnnnnnnnnnnnnnnnnnnnnnnnnnnnnnnnnnnnnnnnnnnnnnnnnnnnnnnnnnnnnnnnnnnnnnnnnnnnnnnnnnnnnnnnnnnnnnnnnnnnnnnnnnnnnnnnnnnnnnnnnnnnnnnnnnnnnnnnnnnnnnnnnnnnnnnnnnnnnnnnnnnnnnnnnnnnnnnnnnnnnnnnnnnnnnnnnnnnnnnnnnnnnnnnnnnnnnnnnnnnnnnnnnnnnnnnnnnnnnnnnnnnnnnnnnnnnnnnnnnnnnnnnnnnnnnnnnnnnnnnnnnnnnnnnnnnnnnnnnnnnnnnnnnnnnnnnnnnnnnnnnnnnnnnnnnnnnnnnnnnnnnnnnnnnnnnnnnnnnnnnnnnnnnnnnnnnnnnnnnnnnnnnnnnnnnnnnnnnnnnnnnnnnnnnnnnnnnnnnnnnnnnnnnnnnnnnnnnnnnnnnnnnnnnnnnnnnnnnnnnnnnnnnnnnnnnnnnnnnnnnnnnnnnnnnnnnnnnnnnnnnnnnnnnnnnnnnnnnnnnnnnnnnnnnnnnnnnnnnnnnnnnnnnnnnnnnnnnnnnnnnnnnnnnnnnnnnnnnnnnnnnnnnnnnnnnnnnnnnnnnnnnnnnnnnnnnnnnnnnnnnnnnnnnnnnnnnnnnnnnnnnnnnnnnnnnnnnnnnnnnnnnnnnnnnnnnnnnnnnnnnnnnnnnnnnnnnnnnnnnnnnnnnnnnnnnnnnnnnnnnnnnnnnnnnnnnnnnnnnnnnnnnnnnnnnnnnnnnnnnnnnnnnnnnnnnnnnnnnnnnnnnnnnnnnnnnnnnnnnnnnnnnnnnnnnnnnnnnnnnnnnnnnnnnnnnnnnnnnnnnnnnnnnnnnnnnnnnnnnnnnnnnnnnnnnnnnnnnnnnnnnnnnnnnnnnnnnnnnnnnnnnnnnnnnnnnnnnnnnnnnnnnnnnnnnnnnnnnnnnnnnnnnnnnnnnnnnnnnnnnnnnnnnnnnnnnnnnnnnnnnnnnnnnnnnnnnnnnnnnnnnnnnnnnnnnnnnnnnnnnnnnnnnnnnnnnnnnnnnnnnnnnnnnnnnnnnnnnnnnnnnnnnnnnnnnnnnnnnnnnnnnnnnnnnnnnnnnnnnnnnnnnnnnnnnnnnnnnnnnnnnnnnnnnnnnnnnnnnnnnnnnnnnnnnnnnnnnnnnnnnnnnnnnnnnnnnnnnnnnnnnnnnnnnnnnnnnnnnnnnnnnnnnnnnnnnnnnnnnnnnnnnnnnnnnnnnnnnnnnnnnnnnnnnnnnnnnnnnnnnnnnnnnnnnnnnnnnnnnnnnnnnnnnnnnnnnnnnnnnnnnnnnnnnnnnnnnnnnnnnnnnnnnnnnnnnnnnnnnnnnnnnnnnnnnnnnnnnnnnnnnnnnnnnnnnnnnnnnnnnnnnnnnnnnnnnnnnnnnnnnnnnnnnnnnnnnnnnnnnnnnnnnnnnnnnnnnnnnnnnnnnnnnnnnnnnnnnnnnnnnnnnnnnnnnnnnnnnnnnnnnnnnnnnnnnnnnnnnnnnnnnnnnnnnnnnnnnnnnnnnnnnnnnnnnnnnnnnnnnnnnnnnnnnnnnnnnnnnnnnnnnnnnnnnnnnnnnnnnnnnnnnnnnnnnnnnnnnnnnnnnnnnnnnnnnnnnnnnnnnnnnnnnnnnnnnnnnnnnnnnnnnnnnnnnnnnnnnnnnnnnnnnnnnnnnnnnnnnnnnnnnnnnnnnnnnnnnnnnnnnnnnnnnnnnnnnnnnnnnnnnnnnnnnnnnnnnnnnnnnnnnnnnnnnnnnnnnnnnnnnnnnnnnnnnnnnnnnnnnnnnnnnnnnnnnnnnnnnnnnnnnnnnnnnnnnnnnnnnnnnnnnnnnnnnnnnnnnnnnnnnnnnnnnnnnnnnnnnnnnnnnnnnnnnnnnnnnnnnnnnnnnnnnnnnnnnnnnnnnnnnnnnnnnnnnnnnnnnnnnnnnnnnnnnnnnnnnnnnnnnnnnnnnnnnnnnnnnnnnnnnnnnnnnnnnnnnnnnnnnnnnnnnnnnnnnnnnnnnnnnnnnnnnnnnnnnnnnnnnnnnnnnnnnnnnnnnnnnnnnnnnnnnnnnnnnnnnnnnnnnnnnnnnnnnnnnnnnnnnnnnnnnnnnnnnnnnnnnnnnnnnnnnnnnnnnnnnnnnnnnnnnnnnnnnnnnnnnnnnnnnnnnnnnnnnnnnnnnnnnnnnnnnnnnnnnnnnnnnnnnnnnnnnnnnnnnnnnnnnnnnnnnnnnnnnnnnnnnnnnnnnnnnnnnnnnnnnnnnnnnnnnnnnnnnnnnnnnnnnnnnnnnnnnnnnnnnnnnnnnnnnnnnnnnnnnnnnnnnnnnnnnnnnnnnnnnnnnnnnnnnnnnnnnnnnnnnnnnnnnnnnnnnnnnnnnnnnnnnnnnnnnnnnnnnnnnnnnnnnnnnnnnnnnnnnnnnnnnnnnnnnnnnnnnnnnnnnnnnnnnnnnnnnnnnnnnnnnnnnnnnnnnnnnnnnnnnnnnnnnnnnnnnnnnnnnnnnnnnnnnnnnnnnnnnnnnnnnnnnnnnnnnnnnnnnnnnnnnnnnnnnnnnnnnnnnnnnnnnnnnnnnnnnnnnnnnnnnnnnnnnnnnnnnnnnnnnnnnnnnnnnnnnnnnnnnnnnnnnnnnnnnnnnnnnnnnnnnnnnnnnnnnnnnnnnnnnnnnnnnnnnnnnnnnnnnnnnnnnnnnnnnnnnnnnnnnnnnnnnnnnnnnnnnnnnnnnnnnnnnnnnnnnnnnnnnnnnnnnnnnnnnnnnnnnnnnnnnnnnnnnnnnnnnnnnnnnnnnnnnnnnnnnnnnnnnnnnnnnnnnnnnnnnnnnnnnnnnnnnnnnnnnnnnnnnnnnnnnnnnnnnnnnnnnnnnnnnnnnnnnnnnnnnnnnnnnnnnnnnnnnnnnnnnnnnnnnnnnnnnnnnnnnnnnnnnnnnnnnnnnnnnnnnnnnnnnnnnnnnnnnnnnnnnnnnnnnnnnnnnnnnnnnnnnnnnnnnnnnnnnnnnnnnnnnnnnnnnnnnnnnnnnnnnnnnnnnnnnnnnnnnnnnnnnnnnnnnnnnnnnnnnnnnnnnnnnnnnnnnnnnnnnnnnnnnnnnnnnnnnnnnnnnnnnnnnnnnnnnnnnnnnnnnnnnnnnnnnnnnnnnnnnnnnnnnnnnnnnnnnnnnnnnnnnnnnnnnnnnnnnnnnnnnnnnnnnnnnnnnnnnnnnnnnnnnnnnnnnnnnnnnnnnnnnnnnnnnnnnnnnnnnnnnnnnnnnnnnnnnnnnnnnnnnnnnnnnnnnnnnnnnnnnnnnnnnnnnnnnnnnnnnnnnnnnnnnnnnnnnnnnnnnnnnnnnnnnnnnnnnnnnnnnnnnnnnnnnnnnnnnnnnnnnnnnnnnnnnnnnnnnnnnnnnnnnnnnnnnnnnnnnnnnnnnnnnnnnnnnnnnnnnnnnnnnnnnnnnnnnnnnnnnnnnnnnnnnnnnnnnnnnnnnnnnnnnnnnnnnnnnnnnnnnnnnnnnnnnnnnnnnnnnnnnnnnnnnnnnnnnnnnnnnnnnnnnnnnnnnnnnnnnnnnnnnnnnnnnnnnnnnnnnnnnnnnnnnnnnnnnnnnnnnnnnnnnnnnnnnnnnnnnnnnnnnnnnnnnnnnnnnnnnnnnnnnnnnnnnnnnnnnnnnnnnnnnnnnnnnnnnnnnnnnnnnnnnnnnnnnnnnnnnnnnnnnnnnnnnnnnnnnnnnnnnnnnnnnnnnnnnnnnnnnnnnnnnnnnnnnnnnnnnnnnnnnnnnnnnnnnnnnnnnnnnnnnnnnnnnnnnnnnnnnnnnnnnnnnnnnnnnnnnnnnnnnnnnnnnnnnnnnnnnnnnnnnnnnnnnnnnnnnnnnnnnnnnnnnnnnnnnnnnnnnnnnnnnnnnnnnnnnnnnnnnnnnnnnnnnnnnnnnnnnnnnnnnnnnnnnnnnnnnnnnnnnnnnnnnnnnnnnnnnnnnnnnnnnnnnnnnnnnnnnnnnnnnnnnnnnnnnnnnnnnnnnnnnnnnnnnnnnnnnnnnnnnnnnnnnnnnnnnnnnnnnnnnnnnnnnnnnnnnnnnnnnnnnnnnnnnnnnnnnnnnnnnnnnnnnnnnnnnnnnnnnnnnnnnnnnnnnnnnnnnnnnnnnnnnnnnnnnnnnnnnnnnnnnnnnnnnnnnnnnnnnnnnnnnnnnnnnnnnnnnnnnnnnnnnnnnnnnnnnnnnnnnnnnnnnnnnnnnnnnnnnnnnnnnnnnnnnnnnnnnnnnnnnnnnnnnnnnnnnnnnnnnnnnnnnnnnnnnnnnnnnnnnnnnnnnnnnnnnnnnnnnnnnnnnnnnnnnnnnnnnnnnnnnnnnnnnnnnnnnnnnnnnnnnnnnnnnnnnnnnnnnnnnnnnnnnnnnnnnnnnnnnnnnnnnnnnnnnnnnnnnnnnnnnnnnnnnnnnnnnnnnnnnnnnnnnnnnnnnnnnnnnnnnnnnnnnnnnnnnnnnnnnnnnnnnnnnnnnnnnnnnnnnnnnnnnnnnnnnnnnnnnnnnnnnnnnnnnnnnnnnnnnnnnnnnnnnnnnnnnnnnnnnnnnnnnnnnnnnnnnnnnnnnnnnnnnnnnnnnnnnnnnnnnnnnnnnnnnnnnnnnnnnnnnnnnnnnnnnnnnnnnnnnnnnnnnnnnnnnnnnnnnnnnnnnnnnnnnnnnnnnnnnnnnnnnnnnnnnnnnnnnnnnnnnnnnnnnnnnnnnnnnnnnnnnnnnnnnnnnnnnnnnnnnnnnnnnnnnnnnnnnnnnnnnnnnnnnnnnnnnnnnnnnnnnnnnnnnnnnnnnnnnnnnnnnnnnnnnnnnnnnnnnnnnnnnnnnnnnnnnnnnnnnnnnnnnnnnnnnnnnnnnnnnnnnnnnnnnnnnnnnnnnnnnnnnnnnnnnnnnnnnnnnnnnnnnnnnnnnnnnnnnnnnnnnnnnnnnnnnnnnnnnnnnnnnnnnnnnnnnnnnnnnnnnnnnnnnnnnnnnnnnnnnnnnnnnnnnnnnnnnnnnnnnnnnnnnnnnnnnnnnnnnnnnnnnnnnnnnnnnnnnnnnnnnnnnnnnnnnnnnnnnnnnnnnnnnnnnnnnnnnnnnnnnnnnnnnnnnnnnnnnnnnnnnnnnnnnnnnnnnnnnnnnnnnnnnnnnnnnnnnnnnnnnnnnnnnnnnnnnnnnnnnnnnnnnnnnnnnnnnnnnnnnnnnnnnnnnnnnnnnnnnnnnnnnnnnnnnnnnnnnnnnnnnnnnnnnnnnnnnnnnnnnnnnnnnnnnnnnnnnnnnnnnnnnnnnnnnnnnnnnnnnnnnnnnnnnnnnnnnnnnnnnnnnnnnnnnnnnnnnnnnnnnnnnnnnnnnnnnnnnnnnnnnnnnnnnnnnnnnnnnnnnnnnnnnnnnnnnnnnnnnnnnnnnnnnnnnnnnnnnnnnnnnnnnnnnnnnnnnnnnnnnnnnnnnnnnnnnnnnnnnnnnnnnnnnnnnnnnnnnnnnnnnnnnnnnnnnnnnnnnnnnnnnnnnnnnnnnnnnnnnnnnnnnnnnnnnnnnnnnnnnnnnnnnnnnnnnnnnnnnnnnnnnnnnnnnnnnnnnnnnnnnnnnnnnnnnnnnnnnnnnnnnnnnnnnnnnnnnnnnnnnnnnnnnnnnnnnnnnnnnnnnnnnnnnnnnnnnnnnnnnnnnnnnnnnnnnnnnnnnnnnnnnnnnnnnnnnnnnnnnnnnnnnnnnnnnnnnnnnnnnnnnnnnnnnnnnnnnnnnnnnnnnnnnnnnnnnnnnnnnnnnnnnnnnnnnnnnnnnnnnnnnnnnnnnnnnnnnnnnnnnnnnnnnnnnnnnnnnnnnnnnnnnnnnnnnnnnnnnnnnnnnnnnnnnnnnnnnnnnnnnnnnnnnnnnnnnnnnnnnnnnnnnnnnnnnnnnnnnnnnnnnnnnnnnnnnnnnnnnnnnnnnnnnnnnnnnnnnnnnnnnnnnnnnnnnnnnnnnnnnnnnnnnnnnnnnnnnnnnnnnnnnnnnnnnnnnnnnnnnnnnnnnnnnnnnnnnnnnnnnnnnnnnnnnnnnnnnnnnnnnnnnnnnnnnnnnnnnnnnnnnnnnnnnnnnnnnnnnnnnnnnnnnnnnnnnnnnnnnnnnnnnnnnnnnnnnnnnnnnnnnnnnnnnnnnnnnnnnnnnnnnnnnnnnnnnnnnnnnnnnnnnnnnnnnnnnnnnnnnnnnnnnnnnnnnnnnnnnnnnnnnnnnnnnnnnnnnnnnnnnnnnnnnnnnnnnnnnnnnnnnnnnnnnnnnnnnnnnnnnnnnnnnnnnnnnnnnnnnnnnnnnnnnnnnnnnnnnnnnnnnnnnnnnnnnnnnnnnnnnnnnnnnnnnnnnnnnnnnnnnnnnnnnnnnnnnnnnnnnnnnnnnnnnnnnnnnnnnnnnnnnnnnnnnnnnnnnnnnnnnnnnnnnnnnnnnnnnnnnnnnnnnnnnnnnnnnnnnnnnnnnnnnnnnnnnnnnnnnnnnnnnnnnnnnnnnnnnnnnnnnnnnnnnnnnnnnnnnnnnnnnnnnnnnnnnnnnnnnnnnnnnnnnnnnnnnnnnnnnnnnnnnnnnnnnnnnnnnnnnnnnnnnnnnnnnnnnnnnnnnnnnnnnnnnnnnnnnnnnnnnnnnnnnnnnnnnnnnnnnnnnnnnnnnnnnnnnnnnnnnnnnnnnnnnnnnnnnnnnnnnnnnnnnnnnnnnnnnnnnnnnnnnnnnnnnnnnnnnnnnnnnnnnnnnnnnnnnnnnnnnnnnnnnnnnnnnnnnnnnnnnnnnnnnnnnnnnnnnnnnnnnnnnnnnnnnnnnnnnnnnnnnnnnnnnnnnnnnnnnnnnnnnnnnnnnnnnnnnnnnnnnnnnnnnnnnnnnnnnnnnnnnnnnnnnnnnnnnnnnnnnnnnnnnnnnnnnnnnnnnnnnnnnnnnnnnnnnnnnnnnnnnnnnnnnnnnnnnnnnnnnnnnnnnnnnnnnnnnnnnnnnnnnnnnnnnnnnnnnnnnnnnnnnnnnnnnnnnnnnnnnnnnnnnnnnnnnnnnnnnnnnnnnnnnnnnnnnnnnnnnnnnnnnnnnnnnnnnnnnnnnnnnnnnnnnnnnnnnnnnnnnnnnnnnnnnnnnnnnnnnnnnnnnnnnnnnnnnnnnnnnnnnnnnnnnnnnnnnnnnnnnnnnnnnnnnnnnnnnnnnnnnnnnnnnnnnnnnnnnnnnnnnnnnnnnnnnnnnnnnnnnnnnnnnnnnnnnnnnnnnnnnnnnnnnnnnnnnnnnnnnnnnnnnnnnnnnnnnnnnnnnnnnnnnnnnnnnnnnnnnnnnnnnnnnnnnnnnnnnnnnnnnnnnnnnnnnnnnnnnnnnnnnnnnnnnnnnnnnnnnnnnnnnnnnnnnnnnnnnnnnnnnnnnnnnnnnnnnnnnnnnnnnnnnnnnnnnnnnnnnnnnnnnnnnnnnnnnnnnnnnnnnnnnnnnnnnnnnnnnnnnnnnnnnnnnnnnnnnnnnnnnnnnnnnnnnnnnnnnnnnnnnnnnnnnnnnnnnnnnnnnnnnnnnnnnnnnnnnnnnnnnnnnnnnnnnnnnnnnnnnnnnnnnnnnnnnnnnnnnnnnnnnnnnnnnnnnnnnnnnnnnnnnnnnnnnnnnnnnnnnnnnnnnnnnnnnnnnnnnnnnnnnnnnnnnnnnnnnnnnnnnnnnnnnnnnnnnnnnnnnnnnnnnnnnnnnnnnnnnnnnnnnnnnnnnnnnnnnnnnnnnnnnnnnnnnnnnnnnnnnnnnnnnnnnnnnnnnnnnnnnnnnnnnnnnnnnnnnnnnnnnnnnnnnnnnnnnnnnnnnnnnnnnnnnnnnnnnnnnnnnnnnnnnnnnnnnnnnnnnnnnnnnnnnnnnnnnnnnnnnnnnnnnnnnnnnnnnnnnnnnnnnnnnnnnnnnnnnnnnnnnnnnnnnnnnnnnnnnnnnnnnnnnnnnnnnnnnnnnnnnnnnnnnnnnnnnnnnnnnnnnnnnnnnnnnnnnnnnnnnnnnnnnnnnnnnnnnnnnnnnnnnnnnnnnnnnnnnnnnnnnnnnnnnnnnnnnnnnnnnnnnnnnnnnnnnnnnnnnnnnnnnnnnnnnnnnnnnnnnnnnnnnnnnnnnnnnnnnnnnnnnnnnnnnnnnnnnnnnnnnnnnnnnnnnnnnnnnnnnnnnnnnnnnnnnnnnnnnnnnnnnnnnnnnnnnnnnnnnnnnnnnnnnnnnnnnnnnnnnnnnnnnnnnnnnnnnnnnnnnnnnnnnnnnnnnnnnnnnnnnnnnnnnnnnnnnnnnnnnnnnnnnnnnnnnnnnnnnnnnnnnnnnnnnnnnnnnnnnnnnnnnnnnnnnnnnnnnnnnnnnnnnnnnnnnnnnnnnnnnnnnnnnnnnnnnnnnnnnnnnnnnnnnnnnnnnnnnnnnnnnnnnnnnnnnnnnnnnnnnnnnnnnnnnnnnnnnnnnnnnnnnnnnnnnnnnnnnnnnnnnnnnnnnnnnnnnnnnnnnnnnnnnnnnnnnnnnnnnnnnnnnnnnnnnnnnnnnnnnnnnnnnnnnnnnnnnnnnnnnnnnnnnnnnnnnnnnnnnnnnnnnnnnnnnnnnnnnnnnnnnnnnnnnnnnnnnnnnnnnnnnnnnnnnnnnnnnnnnnnnnnnnnnnnnnnnnnnnnnnnnnnnnnnnnnnnnnnnnnnnnnnnnnnnnnnnnnnnnnnnnnnnnnnnnnnnnnnnnnnnnnnnnnnnnnnnnnnnnnnnnnnnnnnnnnnnnnnnnnnnnnnnnnnnnnnnnnnnnnnnnnnnnnnnnnnnnnnnnnnnnnnnnnnnnnnnnnnnnnnnnnnnnnnnnnnnnnnnnnnnnnnnnnnnnnnnnnnnnnnnnnnnnnnnnnnnnnnnnnnnnnnnnnnnnnnnnnnnnnnnnnnnnnnnnnnnnnnnnnnnnnnnnnnnnnnnnnnnnnnnnnnnnnnnnnnnnnnnnnnnnnnnnnnnnnnnnnnnnnnnnnnnnnnnnnnnnnnnnnnnnnnnnnnnnnnnnnnnnnnnnnnnnnnnnnnnnnnnnnnnnnnnnnnnnnnnnnnnnnnnnnnnnnnnnnnnnnnnnnnnnnnnnnnnnnnnnnnnnnnnnnnnnnnnnnnnnnnnnnnnnnnnnnnnnnnnnnnnnnnnnnnnnnnnnnnnnnnnnnnnnnnnnnnnnnnnnnnnnnnnnnnnnnnnnnnnnnnnnnnnnnnnnnnnnnnnnnnnnnnnnnnnnnnnnnnnnnnnnnnnnnnnnnnnnnnnnnnnnnnnnnnnnnnnnnnnnnnnnnnnnnnnnnnnnnnnnnnnnnnnnnnnnnnnnnnnnnnnnnnnnnnnnnnnnnnnnnnnnnnnnnnnnnnnnnnnnnnnnnnnnnnnnnnnnnnnnnnnnnnnnnnnnnnnnnnnnnnnnnnnnnnnnnnnnnnnnnnnnnnnnnnnnnnnnnnnnnnnnnnnnnnnnnnnnnnnnnnnnnnnnnnnnnnnnnnnnnnnnnnnnnnnnnnnnnnnnnnnnnnnnnnnnnnnnnnnnnnnnnnnnnnnnnnnnnnnnnnnnnnnnnnnnnnnnnnnnnnnnnnnnnnnnnnnnnnnnnnnnnnnnnnnnnnnnnnnnnnnnnnnnnnnnnnnnnnnnnnnnnnnnnnnnnnnnnnnnnnnnnnnnnnnnnnnnnnnnnnnnnnnnnnnnnnnnnnnnnnnnnnnnnnnnnnnnnnnnnnnnnnnnnnnnnnnnnnnnnnnnnnnnnnnnnnnnnnnnnnnnnnnnnnnnnnnnnnnnnnnnnnnnnnnnnnnnnnnnnnnnnnnnnnnnnnnnnnnnnnnnnnnnnnnnnnnnnnnnnnnnnnnnnnnnnnnnnnnnnnnnnnnnnnnnnnnnnnnnnnnnnnnnnnnnnnnnnnnnnnnnnnnnnnnnnnnnnnnnnnnnnnnnnnnnnnnnnnnnnnnnnnnnnnnnnnnnnnnnnnnnnnnnnnnnnnnnnnnnnnnnnnnnnnnnnnnnnnnnnnnnnnnnnnnnnnnnnnnnnnnnnnnnnnnnnnnnnnnnnnnnnnnnnnnnnnnnnnnnnnnnnnnnnnnnnnnnnnnnnnnnnnnnnnnnnnnnnnnnnnnnnnnnnnnnnnnnnnnnnnnnnnnnnnnnnnnnnnnnnnnnnnnnnnnnnnnnnnnnnnnnnnnnnnnnnnnnnnnnnnnnnnnnnnnnnnnnnnnnnnnnnnnnnnnnnnnnnnnnnnnnnnnnnnnnnnnnnnnnnnnnnnnnnnnnnnnnnnnnnnnnnnnnnnnnnnnnnnnnnnnnnnnnnnnnnnnnnnnnnnnnnnnnnnnnnnnnnnnnnnnnnnnnnnnnnnnnnnnnnnnnnnnnnnnnnnnnnnnnnnnnnnnnnnnnnnnnnnnnnnnnnnnnnnnnnnnnnnnnnnnnnnnnnnnnnnnnnnnnnnnnnnnnnnnnnnnnnnnnnnnnnnnnnnnnnnnnnnnnnnnnnnnnnnnnnnnnnnnnnnnnnnnnnnnnnnnnnnnnnnnnnnnnnnnnnnnnnnnnnnnnnnnnnnnnnnnnnnnnnnnnnnnnnnnnnnnnnnnnnnnnnnnnnnnnnnnnnnnnnnnnnnnnnnnnnnnnnnnnnnnnnnnnnnnnnnnnnnnnnnnnnnnnnnnnnnnnnnnnnnnnnnnnnnnnnnnnnnnnnnnnnnnnnnnnnnnnnnnnnnnnnnnnnnnnnnnnnnnnnnnnnnnnnnnnnnnnnnnnnnnnnnnnnnnnnnnnnnnnnnnnnnnnnnnnnnnnnnnnnnnnnnnnnnnnnnnnnnnnnnnnnnnnnnnnnnnnnnnnnnnnnnnnnnnnnnnnnnnnnnnnnnnnnnnnnnnnnnnnnnnnnnnnnnnnnnnnnnnnnnnnnnnnnnnnnnnnnnnnnnnnnnnnnnnnnnnnnnnnnnnnnnnnnnnnnnnnnnnnnnnnnnnnnnnnnnnnnnnnnnnnnnnnnnnnnnnnnnnnnnnnnnnnnnnnnnnnnnnnnnnnnnnnnnnnnnnnnnnnnnnnnnnnnnnnnnnnnnnnnnnnnnnnnnnnnnnnnnnnnnnnnnnnnnnnnnnnnnnnnnnnnnnnnnnnnnnnnnnnnnnnnnnnnnnnnnnnnnnnnnnnnnnnnnnnnnnnnnnnnnnnnnnnnnnnnnnnnnnnnnnnnnnnnnnnnnnnnnnnnnnnnnnnnnnnnnnnnnnnnnnnnnnnnnnnnnnnnnnnnnnnnnnnnnnnnnnnnnnnnnnnnnnnnnnnnnnnnnnnnnnnnnnnnnnnnnnnnnnnnnnnnnnnnnnnnnnnnnnnnnnnnnnnnnnnnnnnnnnnnnnnnnnnnnnnnnnnnnnnnnnnnnnnnnnnnnnnnnnnnnnnnnnnnnnnnnnnnnnnnnnnnnnnnnnnnnnnnnnnnnnnnnnnnnnnnnnnnnnnnnnnnnnnnnnnnnnnnnnnnnnnnnnnnnnnnnnnnnnnnnnnnnnnnnnnnnnnnnnnnnnnnnnnnnnnnnnnnnnnnnnnnnnnnnnnnnnnnnnnnnnnnnnnnnnnnnnnnnnnnnnnnnnnnnnnnnnnnnnnnnnnnnnnnnnnnnnnnnnnnnnnnnnnnnnnnnnnnnnnnnnnnnnnnnnnnnnnnnnnnnnnnnnnnnnnnnnnnnnnnnnnnnnnnnnnnnnnnnnnnnnnnnnnnnnnnnnnnnnnnnnnnnnnnnnnnnnnnnnnnnnnnnnnnnnnnnnnnnnnnnnnnnnnnnnnnnnnnnnnnnnnnnnnnnnnnnnnnnnnnnnnnnnnnnnnnnnnnnnnnnnnnnnnnnnnnnnnnnnnnnnnnnnnnnnnnnnnnnnnnnnnnnnnnnnnnnnnnnnnnnnnnnnnnnnnnnnnnnnnnnnnnnnnnnnnnnnnnnnnnnnnnnnnnnnnnnnnnnnnnnnnnnnnnnnnnnnnnnnnnnnnnnnnnnnnnnnnnnnnnnnnnnnnnnnnnnnnnnnnnnnnnnnnnnnnnnnnnnnnnnnnnnnnnnnnnnnnnnnnnnnnnnnnnnnnnnnnnnnnnnnnnnnnnnnnnnnnnnnnnnnnnnnnnnnnnnnnnnnnnnnnnnnnnnnnnnnnnnnnnnnnnnnnnnnnnnnnnnnnnnnnnnnnnnnnnnnnnnnnnnnnnnnnnnnnnnnnnnnnnnnnnnnnnnnnnnnnnnnnnnnnnnnnnnnnnnnnnnnnnnnnnnnnnnnnnnnnnnnnnnnnnnnnnnnnnnnnnnnnnnnnnnnnnnnnnnnnnnnnnnnnnnnnnnnnnnnnnnnnnnnnnnnnnnnnnnnnnnnnnnnnnnnnnnnnnnnnnnnnnnnnnnnnnnnnnnnnnnnnnnnnnnnnnnnnnnnnnnnnnnnnnnnnnnnnnnnnnnnnnnnnnnnnnnnnnnnnnnnnnnnnnnnnnnnnnnnnnnnnnnnnnnnnnnnnnnnnnnnnnnnnnnnnnnnnnnnnnnnnnnnnnnnnnnnnnnnnnnnnnnnnnnnnnnnnnnnnnnnnnnnnnnnnnnnnnnnnnnnnnnnnnnnnnnnnnnnnnnnnnnnnnnnnnnnnnnnnnnnnnnnnnnnnnnnnnnnnnnnnnnnnnnnnnnnnnnnnnnnnnnnnnnnnnnnnnnnnnnnnnnnnnnnnnnnnnnnnnnnnnnnnnnnnnnnnnnnnnnnnnnnnnnnnnnnnnnnnnnnnnnnnnnnnnnnnnnnnnnnnnnnnnnnnnnnnnnnnnnnnnnnnnnnnnnnnnnnnnnnnnnnnnnnnnnnnnnnnnnnnnnnnnnnnnnnnnnnnnnnnnnnnnnnnnnnnnnnnnnnnnnnnnnnnnnnnnnnnnnnnnnnnnnnnnnnnnnnnnnnnnnnnnnnnnnnnnnnnnnnnnnnnnnnnnnnnnnnnnnnnnnnnnnnnnnnnnnnnnnnnnnnnnnnnnnnnnnnnnnnnnnnnnnnnnnnnnnnnnnnnnnnnnnnnnnnnnnnnnnnnnnnnnnnnnnnnnnnnnnnnnnnnnnnnnnnnnnnnnnnnnnnnnnnnnnnnnnnnnnnnnnnnnnnnnnnnnnnnnnnnnnnnnnnnnnnnnnnnnnnnnnnnnnnnnnnnnnnnnnnnnnnnnnnnnnnnnnnnnnnnnnnnnnnnnnnnnnnnnnnnnnnnnnnnnnnnnnnnnnnnnnnnnnnnnnnnnnnnnnnnnnnnnnnnnnnnnnnnnnnnnnnnnnnnnnnnnnnnnnnnnnnnnnnnnnnnnnnnnnnnnnnnnnnnnnnnnnnnnnnnnnnnnnnnnnnnnnnnnnnnnnnnnnnnnnnnnnnnnnnnnnnnnnnnnnnnnnnnnnnnnnnnnnnnnnnnnnnnnnnnnnnnnnnnnnnnnnnnnnnnnnnnnnnnnnnnnnnnnnnnnnnnnnnnnnnnnnnnnnnnnnnnnnnnnnnnnnnnnnnnnnnnnnnnnnnnnnnnnnnnnnnnnnnnnnnnnnnnnnnnnnnnnnnnnnnnnnnnnnnnnnnnnnnnnnnnnnnnnnnnnnnnnnnnnnnnnnnnnnnnnnnnnnnnnnnnnnnnnnnnnnnnnnnnnnnnnnnnnnnnnnnnnnnnnnnnnnnnnnnnnnnnnnnnnnnnnnnnnnnnnnnnnnnnnnnnnnnnnnnnnnnnnnnnnnnnnnnnnnnnnnnnnnnnnnnnnnnnnnnnnnnnnnnnnnnnnnnnnnnnnnnnnnnnnnnnnnnnnnnnnnnnnnnnnnnnnnnnnnnnnnnnnnnnnnnnnnnnnnnnnnnnnnnnnnnnnnnnnnnnnnnnnnnnnnnnnnnnnnnnnnnnnnnnnnnnnnnnnnnnnnnnnnnnnnnnnnnnnnnnnnnnnnnnnnnnnnnnnnnnnnnnnnnnnnnnnnnnnnnnnnnnnnnnnnnnnnnnnnnnnnnnnnnnnnnnnnnnnnnnnnnnnnnnnnnnnnnnnnnnnnnnnnnnnnnnnnnnnnnnnnnnnnnnnnnnnnnnnnnnnnnnnnnnnnnnnnnnnnnnnnnnnnnnnnnnnnnnnnnnnnnnnnnnnnnnnnnnnnnnnnnnnnnnnnnnnnnnnnnnnnnnnnnnnnnnnnnnnnnnnnnnnnnnnnnnnnnnnnnnnnnnnnnnnnnnnnnnnnnnnnnnnnnnnnnnnnnnnnnnnnnnnnnnnnnnnnnnnnnnnnnnnnnnnnnnnnnnnnnnnnnnnnnnnnnnnnnnnnnnnnnnnnnnnnnnnnnnnnnnnnnnnnnnnnnnnnnnnnnnnnnnnnnnnnnnnnnnnnnnnnnnnnnnnnnnnnnnnnnnnnnnnnnnnnnnnnnnnnnnnnnnnnnnnnnnnnnnnnnnnnnnnnnnnnnnnnnnnnnnnnnnnnnnnnnnnnnnnnnnnnnnnnnnnnnnnnnnnnnnnnnnnnnnnnnnnnnnnnnnnnnnnnnnnnnnnnnnnnnnnnnnnnnnnnnnnnnnnnnnnnnnnnnnnnnnnnnnnnnnnnnnnnnnnnnnnnnnnnnnnnnnnnnnnnnnnnnnnnnnnnnnnnnnnnnnnnnnnnnnnnnnnnnnnnnnnnnnnnnnnnnnnnnnnnnnnnnnnnnnnnnnnnnnnnnnnnnnnnnnnnnnnnnnnnnnnnnnnnnnnnnnnnnnnnnnnnnnnnnnnnnnnnnnnnnnnnnnnnnnnnnnnnnnnnnnnnnnnnnnnnnnnnnnnnnnnnnnnnnnnnnnnnnnnnnnnnnnnnnnnnnnnnnnnnnnnnnnnnnnnnnnnnnnnnnnnnnnnnnnnnnnnnnnnnnnnnnnnnnnnnnnnnnnnnnnnnnnnnnnnnnnnnnnnnnnnnnnnnnnnnnnnnnnnnnnnnnnnnnnnnnnnnnnnnnnnnnnnnnnnnnnnnnnnnnnnnnnnnnnnnnnnnnnnnnnnnnnnnnnnnnnnnnnnnnnnnnnnnnnnnnnnnnnnnnnnnnnnnnnnnnnnnnnnnnnnnnnnnnnnnnnnnnnnnnnnnnnnnnnnnnnnnnnnnnnnnnnnnnnnnnnnnnnnnnnnnnnnnnnnnnnnnnnnnnnnnnnnnnnnnnnnnnnnnnnnnnnnnnnnnnnnnnnnnnnnnnnnnnnnnnnnnnnnnnnnnnnnnnnnnnnnnnnnnnnnnnnnnnnnnnnnnnnnnnnnnnnnnnnnnnnnnnnnnnnnnnnnnnnnnnnnnnnnnnnnnnnnnnnnnnnnnnnnnnnnnnnnnnnnnnnnnnnnnnnnnnnnnnnnnnnnnnnnnnnnnnnnnnnnnnnnnnnnnnnnnnnnnnnnnnnnnnnnnnnnnnnnnnnnnnnnnnnnnnnnnnnnnnnnnnnnnnnnnnnnnnnnnnnnnnnnnnnnnnnnnnnnnnnnnnnnnnnnnnnnnnnnnnnnnnnnnnnnnnnnnnnnnnnnnnnnnnnnnnnnnnnnnnnnnnnnnnnnnnnnnnnnnnnnnnnnnnnnnnnnnnnnnnnnnnnnnnnnnnnnnnnnnnnnnnnnnnnnnnnnnnnnnnnnnnnnnnnnnnnnnnnnnnnnnnnnnnnnnnnnnnnnnnnnnnnnnnnnnnnnnnnnnnnnnnnnnnnnnnnnnnnnnnnnnnnnnnnnnnnnnnnnnnnnnnnnnnnnnnnnnnnnnnnnnnnnnnnnnnnnnnnnnnnnnnnnnnnnnnnnnnnnnnnnnnnnnnnnnnnnnnnnnnnnnnnnnnnnnnnnnnnnnnnnnnnnnnnnnnnnnnnnnnnnnnnnnnnnnnnnnnnnnnnnnnnnnnnnnnnnnnnnnnnnnnnnnnnnnnnnnnnnnnnnnnnnnnnnnnnnnnnnnnnnnnnnnnnnnnnnnnnnnnnnnnnnnnnnnnnnnnnnnnnnnnnnnnnnnnnnnnnnnnnnnnnnnnnnnnnnnnnnnnnnnnnnnnnnnnnnnnnnnnnnnnnnnnnnnnnnnnnnnnnnnnnnnnnnnnnnnnnnnnnnnnnnnnnnnnnnnnnnnnnnnnnnnnnnnnnnnnnnnnnnnnnnnnnnnnnnnnnnnnnnnnnnnnnnnnnnnnnnnnnnnnnnnnnnnnnnnnnnnnnnnnnnnnnnnnnnnnnnnnnnnnnnnnnnnnnnnnnnnnnnnnnnnnnnnnnnnnnnnnnnnnnnnnnnnnnnnnnnnnnnnnnnnnnnnnnnnnnnnnnnnnnnnnnnnnnnnnnnnnnnnnnnnnnnnnnnnnnnnnnnnnnnnnnnnnnnnnnnnnnnnnnnnnnnnnnnnnnnnnnnnnnnnnnnnnnnnnnnnnnnnnnnnnnnnnnnnnnnnnnnnnnnnnnnnnnnnnnnnnnnnnnnnnnnnnnnnnnnnnnnnnnnnnnnnnnnnnnnnnnnnnnnnnnnnnnnnnnnnnnnnnnnnnnnnnnnnnnnnnnnnnnnnnnnnnnnnnnnnnnnnnnnnnnnnnnnnnnnnnnnnnnnnnnnnnnnnnnnnnnnnnnnnnnnnnnnnnnnnnnnnnnnnnnnnnnnnnnnnnnnnnnnnnnnnnnnnnnnnnnnnnnnnnnnnnnnnnnnnnnnnnnnnnnnnnnnnnnnnnnnnnnnnnnnnnnnnnnnnnnnnnnnnnnnnnnnnnnnnnnnnnnnnnnnnnnnnnnnnnnnnnnnnnnnnnnnnnnnnnnnnnnnnnnnnnnnnnnnnnnnnnnnnnnnnnnnnnnnnnnnnnnnnnnnnnnnnnnnnnnnnnnnnnnnnnnnnnnnnnnnnnnnnnnnnnnnnnnnnnnnnnnnnnnnnnnnnnnnnnnnnnnnnnnnnnnnnnnnnnnnnnnnnnnnnnnnnnnnnnnnnnnnnnnnnnnnnnnnnnnnnnnnnnnnnnnnnnnnnnnnnnnnnnnnnnnnnnnnnnnnnnnnnnnnnnnnnnnnnnnnnnnnnnnnnnnnnnnnnnnnnnnnnnnnnnnnnnnnnnnnnnnnnnnnnnnnnnnnnnnnnnnnnnnnnnnnnnnnnnnnnnnnnnnnnnnnnnnnnnnnnnnnnnnnnnnnnnnnnnnnnnnnnnnnnnnnnnnnnnnnnnnnnnnnnnnnnnnnnnnnnnnnnnnnnnnnnnnnnnnnnnnnnnnnnnnnnnnnnnnnnnnnnnnnnnnnnnnnnnnnnnnnnnnnnnnnnnnnnnnnnnnnnnnnnnnnnnnnnnnnnnnnnnnnnnnnnnnnnnnnnnnnnnnnnnnnnnnnnnnnnnnnnnnnnnnnnnnnnnnnnnnnnnnnnnnnnnnnnnnnnnnnnnnnnnnnnnnnnnnnnnnnnnnnnnnnnnnnnnnnnnnnnnnnnnnnnnnnnnnnnnnnnnnnnnnnnnnnnnnnnnnnnnnnnnnnnnnnnnnnnnnnnnnnnnnnnnnnnnnnnnnnnnnnnnnnnnnnnnnnnnnnnnnnnnnnnnnnnnnnnnnnnnnnnnnnnnnnnnnnnnnnnnnnnnnnnnnnnnnnnnnnnnnnnnnnnnnnnnnnnnnnnnnnnnnnnnnnnnnnnnnnnnnnnnnnnnnnnnnnnnnnnnnnnnnnnnnnnnnnnnnnnnnnnnnnnnnnnnnnnnnnnnnnnnnnnnnnnnnnnnnnnnnnnnnnnnnnnnnnnnnnnnnnnnnnnnnnnnnnnnnnnnnnnnnnnnnnnnnnnnnnnnnnnnnnnnnnnnnnnnnnnnnnnnnnnnnnnnnnnnnnnnnnnnnnnnnnnnnnnnnnnnnnnnnnnnnnnnnnnnnnnnnnnnnnnnnnnnnnnnnnnnnnnnnnnnnnnnnnnnnnnnnnnnnnnnnnnnnnnnnnnnnnnnnnnnnnnnnnnnnnnnnnnnnnnnnnnnnnnnnnnnnnnnnnnnnnnnnnnnnnnnnnnnnnnnnnnnnnnnnnnnnnnnnnnnnnnnnnnnnnnnnnnnnnnnnnnnnnnnnnnnnnnnnnnnnnnnnnnnnnnnnnnnnnnnnnnnnnnnnnnnnnnnnnnnnnnnnnnnnnnnnnnnnnnnnnnnnnnnnnnnnnnnnnnnnnnnnnnnnnnnnnnnnnnnnnnnnnnnnnnnnnnnnnnnnnnnnnnnnnnnnnnnnnnnnnnnnnnnnnnnnnnnnnnnnnnnnnnnnnnnnnnnnnnnnnnnnnnnnnnnnnnnnnnnnnnnnnnnnnnnnnnnnnnnnnnnnnnnnnnnnnnnnnnnnnnnnnnnnnnnnnnnnnnnnnnnnnnnnnnnnnnnnnnnnnnnnnnnnnnnnnnnnnnnnnnnnnnnnnnnnnnnnnnnnnnnnnnnnnnnnnnnnnnnnnnnnnnnnnnnnnnnnnnnnnnnnnnnnnnnnnnnnnnnnnnnnnnnnnnnnnnnnnnnnnnnnnnnnnnnnnnnnnnnnnnnnnnnnnnnnnnnnnnnnnnnnnnnnnnnnnnnnnnnnnnnnnnnnnnnnnnnnnnnnnnnnnnnnnnnnnnnnnnnnnnnnnnnnnnnnnnnnnnnnnnnnnnnnnnnnnnnnnnnnnnnnnnnnnnnnnnnnnnnnnnnnnnnnnnnnnnnnnnnnnnnnnnnnnnnnnnnnnnnnnnnnnnnnnnnnnnnnnnnnnnnnnnnnnnnnnnnnnnnnnnnnnnnnnnnnnnnnnnnnnnnnnnnnnnnnnnnnnnnnnnnnnnnnnnnnnnnnnnnnnnnnnnnnnnnnnnnnnnnnnnnnnnnnnnnnnnnnnnnnnnnnnnnnnnnnnnnnnnnnnnnnnnnnnnnnnnnnnnnnnnnnnnnnnnnnnnnnnnnnnnnnnnnnnnnnnnnnnnnnnnnnnnnnnnnnnnnnnnnnnnnnnnnnnnnnnnnnnnnnnnnnnnnnnnnnnnnnnnnnnnnnnnnnnnnnnnnnnnnnnnnnnnnnnnnnnnnnnnnnnnnnnnnnnnnnnnnnnnnnnnnnnnnnnnnnnnnnnnnnnnnnnnnnnnnnnnnnnnnnnnnnnnnnnnnnnnnnnnnnnnnnnnnnnnnnnnnnnnnnnnnnnnnnnnnnnnnnnnnnnnnnnnnnnnnnnnnnnnnnnnnnnnnnnnnnnnnnnnnnnnnnnnnnnnnnnnnnnnnnnnnnnnnnnnnnnnnnnnnnnnnnnnnnnnnnnnnnnnnnnnnnnnnnnnnnnnnnnnnnnnnnnnnnnnnnnnnnnnnnnnnnnnnnnnnnnnnnnnnnnnnnnnnnnnnnnnnnnnnnnnnnnnnnnnnnnnnnnnnnnnnnnnnnnnnnnnnnnnnnnnnnnnnnnnnnnnnnnnnnnnnnnnnnnnnnnnnnnnnnnnnnnnnnnnnnnnnnnnnnnnnnnnnnnnnnnnnnnnnnnnnnnnnnnnnnnnnnnnnnnnnnnnnnnnnnnnnnnnnnnnnnnnnnnnnnnnnnnnnnnnnnnnnnnnnnnnnnnnnnnnnnnnnnnnnnnnnnnnnnnnnnnnnnnnnnnnnnnnnnnnnnnnnnnnnnnnnnnnnnnnnnnnnnnnnnnnnnnnnnnnnnnnnnnnnnnnnnnnnnnnnnnnnnnnnnnnnnnnnnnnnnnnnnnnnnnnnnnnnnnnnnnnnnnnnnnnnnnnnnnnnnnnnnnnnnnnnnnnnnnnnnnnnnnnnnnnnnnnnnnnnnnnnnnnnnnnnnnnnnnnnnnnnnnnnnnnnnnnnnnnnnnnnnnnnnnnnnnnnnnnnnnnnnnnnnnnnnnnnnnnnnnnnnnnnnnnnnnnnnnnnnnnnnnnnnnnnnnnnnnnnnnnnnnnnnnnnnnnnnnnnnnnnnnnnnnnnnnnnnnnnnnnnnnnnnnnnnnnnnnnnnnnnnnnnnnnnnnnnnnnnnnnnnnnnnnnnnnnnnnnnnnnnnnnnnnnnnnnnnnnnnnnnnnnnnnnnnnnnnnnnnnnnnnnnnnnnnnnnnnnnnnnnnnnnnnnnnnnnnnnnnnnnnnnnnnnnnnnnnnnnnnnnnnnnnnnnnnnnnnnnnnnnnnnnnnnnnnnnnnnnnnnnnnnnnnnnnnnnnnnnnnnnnnnnnnnnnnnnnnnnnnnnnnnnnnnnnnnnnnnnnnnnnnnnnnnnnnnnnnnnnnnnnnnnnnnnnnnnnnnnnnnnnnnnnnnnnnnnnnnnnnnnnnnnnnnnnnnnnnnnnnnnnnnnnnnnnnnnnnnnnnnnnnnnnnnnnnnnnnnnnnnnnnnnnnnnnnnnnnnnnnnnnnnnnnnnnnnnnnnnnnnnnnnnnnnnnnnnnnnnnnnnnnnnnnnnnnnnnnnnnnnnnnnnnnnnnnnnnnnnnnnnnnnnnnnnnnnnnnnnnnnnnnnnnnnnnnnnnnnnnnnnnnnnnnnnnnnnnnnnnnnnnnnnnnnnnnnnnnnnnnnnnnnnnnnnnnnnnnnnnnnnnnnnnnnnnnnnnnnnnnnnnnnnnnnnnnnnnnnnnnnnnnnnnnnnnnnnnnnnnnnnnnnnnnnnnnnnnnnnnnnnnnnnnnnnnnnnnnnnnnnnnnnnnnnnnnnnnnnnnnnnnnnnnnnnnnnnnnnnnnnnnnnnnnnnnnnnnnnnnnnnnnnnnnnnnnnnnnnnnnnnnnnnnnnnnnnnnnnnnnnnnnnnnnnnnnnnnnnnnnnnnnnnnnnnnnnnnnnnnnnnnnnnnnnnnnnnnnnnnnnnnnnnnnnnnnnnnnnnnnnnnnnnnnnnnnnnnnnnnnnnnnnnnnnnnnnnnnnnnnnnnnnnnnnnnnnnnnnnnnnnnnnnnnnnnnnnnnnnnnnnnnnnnnnnnnnnnnnnnnnnnnnnnnnnnnnnnnnnnnnnnnnnnnnnnnnnnnnnnnnnnnnnnnnnnnnnnnnnnnnnnnnnnnnnnnnnnnnnnnnnnnnnnnnnnnnnnnnnnnnnnnnnnnnnnnnnnnnnnnnnnnnnnnnnnnnnnnnnnnnnnnnnnnnnnnnnnnnnnnnnnnnnnnnnnnnnnnnnnnnnnnnnnnnnnnnnnnnnnnnnnnnnnnnnnnnnnnnnnnnnnnnnnnnnnnnnnnnnnnnnnnnnnnnnnnnnnnnnnnnnnnnnnnnnnnnnnnnnnnnnnnnnnnnnnnnnnnnnnnnnnnnnnnnnnnnnnnnnnnnnnnnnnnnnnnnnnnnnnnnnnnnnnnnnnnnnnnnnnnnnnnnnnnnnnnnnnnnnnnnnnnnnnnnnnnnnnnnnnnnnnnnnnnnnnnnnnnnnnnnnnnnnnnnnnnnnnnnnnnnnnnnnnnnnnnnnnnnnnnnnnnnnnnnnnnnnnnnnnnnnnnnnnnnnnnnnnnnnnnnnnnnnnnnnnnnnnnnnnnnnnnnnnnnnnnnnnnnnnnnnnnnnnnnnnnnnnnnnnnnnnnnnnnnnnnnnnnnnnnnnnnnnnnnnnnnnnnnnnnnnnnnnnnnnnnnnnnnnnnnnnnnnnnnnnnnnnnnnnnnnnnnnnnnnnnnnnnnnnnnnnnnnnnnnnnnnnnnnnnnnnnnnnnnnnnnnnnnnnnnnnnnnnnnnnnnnnnnnnnnnnnnnnnnnnnnnnnnnnnnnnnnnnnnnnnnnnnnnnnnnnnnnnnnnnnnnnnnnnnnnnnnnnnnnnnnnnnnnnnnnnnnnnnnnnnnnnnnnnnnnnnnnnnnnnnnnnnnnnnnnnnnnnnnnnnnnnnnnnnnnnnnnnnnnnnnnnnnnnnnnnnnnnnnnnnnnnnnnnnnnnnnnnnnnnnnnnnnnnnnnnnnnnnnnnnnnnnnnnnnnnnnnnnnnnnnnnnnnnnnnnnnnnnnnnnnnnnnnnnnnnnnnnnnnnnnnnnnnnnnnnnnnnnnnnnnnnnnnnnnnnnnnnnnnnnnnnnnnnnnnnnnnnnnnnnnnnnnnnnnnnnnnnnnnnnnnnnnnnnnnnnnnnnnnnnnnnnnnnnnnnnnnnnnnnnnnnnnnnnnnnnnnnnnnnnnnnnnnnnnnnnnnnnnnnnnnnnnnnnnnnnnnnnnnnnnnnnnnnnnnnnnnnnnnnnnnnnnnnnnnnnnnnnnnnnnnnnnnnnnnnnnnnnnnnnnnnnnnnnnnnnnnnnnnnnnnnnnnnnnnnnnnnnnnnnnnnnnnnnnnnnnnnnnnnnnnnnnnnnnnnnnnnnnnnnnnnnnnnnnnnnnnnnnnnnnnnnnnnnnnnnnnnnnnnnnnnnnnnnnnnnnnnnnnnnnnnnnnnnnnnnnnnnnnnnnnnnnnnnnnnnnnnnnnnnnnnnnnnnnnnnnnnnnnnnnnnnnnnnnnnnnnnnnnnnnnnnnnnnnnnnnnnnnnnnnnnnnnnnnnnnnnnnnnnnnnnnnnnnnnnnnnnnnnnnnnnnnnnnnnnnnnnnnnnnnnnnnnnnnnnnnnnnnnnnnnnnnnnnnnnnnnnnnnnnnnnnnnnnnnnnnnnnnnnnnnnnnnnnnnnnnnnnnnnnnnnnnnnnnnnnnnnnnnnnnnnnnnnnnnnnnnnnnnnnnnnnnnnnnnnnnnnnnnnnnnnnnnnnnnnnnnnnnnnnnnnnnnnnnnnnnnnnnnnnnnnnnnnnnnnnnnnnnnnnnnnnnnnnnnnnnnnnnnnnnnnnnnnnnnnnnnnnnnnnnnnnnnnnnnnnnnnnnnnnnnnnnnnnnnnnnnnnnnnnnnnnnnnnnnnnnnnnnnnnnnnnnnnnnnnnnnnnnnnnnnnnnnnnnnnnnnnnnnnnnnnnnnnnnnnnnnnnnnnnnnnnnnnnnnnnnnnnnnnnnnnnnnnnnnnnnnnnnnnnnnnnnnnnnnnnnnnnnnnnnnnnnnnnnnnnnnnnnnnnnnnnnnnnnnnnnnnnnnnnnnnnnnnnnnnnnnnnnnnnnnnnnnnnnnnnnnnnnnnnnnnnnnnnnnnnnnnnnnnnnnnnnnnnnnnnnnnnnnnnnnnnnnnnnnnnnnnnnnnnnnnnnnnnnnnnnnnnnnnnnnnnnnnnnnnnnnnnnnnnnnnnnnnnnnnnnnnnnnnnnnnnnnnnnnnnnnnnnnnnnnnnnnnnnnnnnnnnnnnnnnnnnnnnnnnnnnnnnnnnnnnnnnnnnnnnnnnnnnnnnnnnnnnnnnnnnnnnnnnnnnnnnnnnnnnnnnnnnnnnnnnnnnnnnnnnnnnnnnnnnnnnnnnnnnnnnnnnnnnnnnnnnnnnnnnnnnnnnnnnnnnnnnnnnnnnnnnnnnnnnnnnnnnnnnnnnnnnnnnnnnnnnnnnnnnnnnnnnnnnnnnnnnnnnnnnnnnnnnnnnnnnnnnnnnnnnnnnnnnnnnnnnnnnnnnnnnnnnnnnnnnnnnnnnnnnnnnnnnnnnnnnnnnnnnnnnnnnnnnnnnnnnnnnnnnnnnnnnnnnnnnnnnnnnnnnnnnnnnnnnnnnnnnnnnnnnnnnnnnnnnnnnnnnnnnnnnnnnnnnnnnnnnnnnnnnnnnnnnnnnnnnnnnnnnnnnnnnnnnnnnnnnnnnnnnnnnnnnnnnnnnnnnnnnnnnnnnnnnnnnnnnnnnnnnnnnnnnnnnnnnnnnnnnnnnnnnnnnnnnnnnnnnnnnnnnnnnnnnnnnnnnnnnnnnnnnnnnnnnnnnnnnnnnnnnnnnnnnnnnnnnnnnnnnnnnnnnnnnnnnnnnnnnnnnnnnnnnnnnnnnnnnnnnnnnnnnnnnnnnnnnnnnnnnnnnnnnnnnnnnnnnnnnnnnnnnnnnnnnnnnnnnnnnnnnnnnnnnnnnnnnnnnnnnnnnnnnnnnnnnnnnnnnnnnnnnnnnnnnnnnnnnnnnnnnnnnnnnnnnnnnnnnnnnnnnnnnnnnnnnnnnnnnnnnnnnnnnnnnnnnnnnnnnnnnnnnnnnnnnnnnnnnnnnnnnnnnnnnnnnnnnnnnnnnnnnnnnnnnnnnnnnnnnnnnnnnnnnnnnnnnnnnnnnnnnnnnnnnnnnnnnnnnnnnnnnnnnnnnnnnnnnnnnnnnnnnnnnnnnnnnnnnnnnnnnnnnnnnnnnnnnnnnnnnnnnnnnnnnnnnnnnnnnnnnnnnnnnnnnnnnnnnnnnnnnnnnnnnnnnnnnnnnnnnnnnnnnnnnnnnnnnnnnnnnnnnnnnnnnnnnnnnnnnnnnnnnnnnnnnnnnnnnnnnnnnnnnnnnnnnnnnnnnnnnnnnnnnnnnnnnnnnnnnnnnnnnnnnnnnnnnnnnnnnnnnnnnnnnnnnnnnnnnnnnnnnnnnnnnnnnnnnnnnnnnnnnnnnnnnnnnnnnnnnnnnnnnnnnnnnnnnnnnnnnnnnnnnnnnnnnnnnnnnnnnnnnnnnnnnnnnnnnnnnnnnnnnnnnnnnnnnnnnnnnnnnnnnnnnnnnnnnnnnnnnnnnnnnnnnnnnnnnnnnnnnnnnnnnnnnnnnnnnnnnnnnnnnnnnnnnnnnnnnnnnnnnnnnnnnnnnnnnnnnnnnnnnnnnnnnnnnnnnnnnnnnnnnnnnnnnnnnnnnnnnnnnnnnnnnnnnnnnnnnnnnnnnnnnnnnnnnnnnnnnnnnnnnnnnnnnnnnnnnnnnnnnnnnnnnnnnnnnnnnnnnnnnnnnnnnnnnnnnnnnnnnnnnnnnnnnnnnnnnnnnnnnnnnnnnnnnnnnnnnnnnnnnnnnnnnnnnnnnnnnnnnnnnnnnnnnnnnnnnnnnnnnnnnnnnnnnnnnnnnnnnnnnnnnnnnnnnnnnnnnnnnnnnnnnnnnnnnnnnnnnnnnnnnnnnnnnnnnnnnnnnnnnnnnnnnnnnnnnnnnnnnnnnnnnnnnnnnnnnnnnnnnnnnnnnnnnnnnnnnnnnnnnnnnnnnnnnnnnnnnnnnnnnnnnnnnnnnnnnnnnnnnnnnnnnnnnnnnnnnnnnnnnnnnnnnnnnnnnnnnnnnnnnnnnnnnnnnnnnnnnnnnnnnnnnnnnnnnnnnnnnnnnnnnnnnnnnnnnnnnnnnnnnnnnnnnnnnnnnnnnnnnnnnnnnnnnnnnnnnnnnnnnnnnnnnnnnnnnnnnnnnnnnnnnnnnnnnnnnnnnnnnnnnnnnnnnnnnnnnnnnnnnnnnnnnnnnnnnnnnnnnnnnnnnnnnnnnnnnnnnnnnnnnnnnnnnnnnnnnnnnnnnnnnnnnnnnnnnnnnnnnnnnnnnnnnnnnnnnnnnnnnnnnnnnnnnnnnnnnnnnnnnnnnnnnnnnnnnnnnnnnnnnnnnnnnnnnnnnnnnnnnnnnnnnnnnnnnnnnnnnnnnnnnnnnnnnnnnnnnnnnnnnnnnnnnnnnnnnnnnnnnnnnnnnnnnnnnnnnnnnnnnnnnnnnnnnnnnnnnnnnnnnnnnnnnnnnnnnnnnnnnnnnnnnnnnnnnnnnnnnnnnnnnnnnnnnnnnnnnnnnnnnnnnnnnnnnnnnnnnnnnnnnnnnnnnnnnnnnnnnnnnnnnnnnnnnnnnnnnnnnnnnnnnnnnnnnnnnnnnnnnnnnnnnnnnnnnnnnnnnnnnnnnnnnnnnnnnnnnnnnnnnnnnnnnnnnnnnnnnnnnnnnnnnnnnnnnnnnnnnnnnnnnnnnnnnnnnnnnnnnnnnnnnnnnnnnnnnnnnnnnnnnnnnnnnnnnnnnnnnnnnnnnnnnnnnnnnnnnnnnnnnnnnnnnnnnnnnnnnnnnnnnnnnnnnnnnnnnnnnnnnnnnnnnnnnnnnnnnnnnnnnnnnnnnnnnnnnnnnnnnnnnnnnnnnnnnnnnnnnnnnnnnnnnnnnnnnnnnnnnnnnnnnnnnnnnnnnnnnnnnnnnnnnnnnnnnnnnnnnnnnnnnnnnnnnnnnnnnnnnnnnnnnnnnnnnnnnnnnnnnnnnnnnnnnnnnnnnnnnnnnnnnnnnnnnnnnnnnnnnnnnnnnnnnnnnnnnnnnnnnnnnnnnnnnnnnnnnnnnnnnnnnnnnnnnnnnnnnnnnnnnnnnnnnnnnnnnnnnnnnnnnnnnnnnnnnnnnnnnnnnnnnnnnnnnnnnnnnnnnnnnnnnnnnnnnnnnnnnnnnnnnnnnnnnnnnnnnnnnnnnnnnnnnnnnnnnnnnnnnnnnnnnnnnnnnnnnnnnnnnnnnnnnnnnnnnnnnnnnnnnnnnnnnnnnnnnnnnnnnnnnnnnnnnnnnnnnnnnnnnnnnnnnnnnnnnnnnnnnnnnnnnnnnnnnnnnnnnnnnnnnnnnnnnnnnnnnnnnnnnnnnnnnnnnnnnnnnnnnnnnnnnnnnnnnnnnnnnnnnnnnnnnnnnnnnnnnnnnnnnnnnnnnnnnnnnnnnnnnnnnnnnnnnnnnnnnnnnnnnnnnnnnnnnnnnnnnnnnnnnnnnnnnnnnnnnnnnnnnnnnnnnnnnnnnnnnnnnnnnnnnnnnnnnnnnnnnnnnnnnnnnnnnnnnnnnnnnnnnnnnnnnnnnnnnnnnnnnnnnnnnnnnnnnnnnnnnnnnnnnnnnnnnnnnnnnnnnnnnnnnnnnnnnnnnnnnnnnnnnnnnnnnnnnnnnnnnnnnnnnnnnnnnnnnnnnnnnnnnnnnnnnnnnnnnnnnnnnnnnnnnnnnnnnnnnnnnnnnnnnnnnnnnnnnnnnnnnnnnnnnnnnnnnnnnnnnnnnnnnnnnnnnnnnnnnnnnnnnnnnnnnnnnnnnnnnnnnnnnnnnnnnnnnnnnnnnnnnnnnnnnnnnnnnnnnnnnnnnnnnnnnnnnnnnnnnnnnnnnnnnnnnnnnnnnnnnnnnnnnnnnnnnnnnnnnnnnnnnnnnnnnnnnnnnnnnnnnnnnnnnnnnnnnnnnnnnnnnnnnnnnnnnnnnnnnnnnnnnnnnnnnnnnnnnnnnnnnnnnnnnnnnnnnnnnnnnnnnnnnnnnnnnnnnnnnnnnnnnnnnnnnnnnnnnnnnnnnnnnnnnnnnnnnnnnnnnnnnnnnnnnnnnnnnnnnnnnnnnnnnnnnnnnnnnnnnnnnnnnnnnnnnnnnnnnnnnnnnnnnnnnnnnnnnnnnnnnnnnnnnnnnnnnnnnnnnnnnnnnnnnnnnnnnnnnnnnnnnnnnnnnnnnnnnnnnnnnnnnnnnnnnnnnnnnnnnnnnnnnnnnnnnnnnnnnnnnnnnnnnnnnnnnnnnnnnnnnnnnnnnnnnnnnnnnnnnnnnnnnnnnnnnnnnnnnnnnnnnnnnnnnnnnnnnnnnnnnnnnnnnnnnnnnnnnnnnnnnnnnnnnnnnnnnnnnnnnnnnnnnnnnnnnnnnnnnnnnnnnnnnnnnnnnnnnnnnnnnnnnnnnnnnnnnnnnnnnnnnnnnnnnnnnnnnnnnnnnnnnnnnnnnnnnnnnnnnnnnnnnnnnnnnnnnnnnnnnnnnnnnnnnnnnnnnnnnnnnnnnnnnnnnnnnnnnnnnnnnnnnnnnnnnnnnnnnnnnnnnnnnnnnnnnnnnnnnnnnnnnnnnnnnnnnnnnnnnnnnnnnnnnnnnnnnnnnnnnnnnnnnnnnnnnnnnnnnnnnnnnnnnnnnnnnnnnnnnnnnnnnnnnnnnnnnnnnnnnnnnnnnnnnnnnnnnnnnnnnnnnnnnnnnnnnnnnnnnnnnnnnnnnnnnnnnnnnnnnnnnnnnnnnnnnnnnnnnnnnnnnnnnnnnnnnnnnnnnnnnnnnnnnnnnnnnnnnnnnnnnnnnnnnnnnnnnnnnnnnnnnnnnnnnnnnnnnnnnnnnnnnnnnnnnnnnnnnnnnnnnnnnnnnnnnnnnnnnnnnnnnnnnnnnnnnnnnnnnnnnnnnnnnnnnnnnnnnnnnnnnnnnnnnnnnnnnnnnnnnnnnnnnnnnnnnnnnnnnnnnnnnnnnnnnnnnnnnnnnnnnnnnnnnnnnnnnnnnnnnnnnnnnnnnnnnnnnnnnnnnnnnnnnnnnnnnnnnnnnnnnnnnnnnnnnnnnnnnnnnnnnnnnnnnnnnnnnnnnnnnnnnnnnnnnnnnnnnnnnnnnnnnnnnnnnnnnnnnnnnnnnnnnnnnnnnnnnnnnnnnnnnnnnnnnnnnnnnnnnnnnnnnnnnnnnnnnnnnnnnnnnnnnnnnnnnnnnnnnnnnnnnnnnnnnnnnnnnnnnnnnnnnnnnnnnnnnnnnnnnnnnnnnnnnnnnnnnnnnnnnnnnnnnnnnnnnnnnnnnnnnnnnnnnnnnnnnnnnnnnnnnnnnnnnnnnnnnnnnnnnnnnnnnnnnnnnnnnnnnnnnnnnnnnnnnnnnnnnnnnnnnnnnnnnnnnnnnnnnnnnnnnnnnnnnnnnnnnnnnnnnnnnnnnnnnnnnnnnnnnnnnnnnnnnnnnnnnnnnnnnnnnnnnnnnnnnnnnnnnnnnnnnnnnnnnnnnnnnnnnnnnnnnnnnnnnnnnnnnnnnnnnnnnnnnnnnnnnnnnnnnnnnnnnnnnnnnnnnnnnnnnnnnnnnnnnnnnnnnnnnnnnnnnnnnnnnnnnnnnnnnnnnnnnnnnnnnnnnnnnnnnnnnnnnnnnnnnnnnnnnnnnnnnnnnnnnnnnnnnnnnnnnnnnnnnnnnnnnnnnnnnnnnnnnnnnnnnnnnnnnnnnnnnnnnnnnnnnnnnnnnnnnnnnnnnnnnnnnnnnnnnnnnnnnnnnnnnnnnnnnnnnnnnnnnnnnnnnnnnnnnnnnnnnnnnnnnnnnnnnnnnnnnnnnnnnnnnnnnnnnnnnnnnnnnnnnnnnnnnnnnnnnnnnnnnnnnnnnnnnnnnnnnnnnnnnnnnnnnnnnnnnnnnnnnnnnnnnnnnnnnnnnnnnnnnnnnnnnnnnnnnnnnnnnnnnnnnnnnnnnnnnnnnnnnnnnnnnnnnnnnnnnnnnnnnnnnnnnnnnnnnnnnnnnnnnnnnnnnnnnnnnnnnnnnnnnnnnnnnnnnnnnnnnnnnnnnnnnnnnnnnnnnnnnnnnnnnnnnnnnnnnnnnnnnnnnnnnnnnnnnnnnnnnnnnnnnnnnnnnnnnnnnnnnnnnnnnnnnnnnnnnnnnnnnnnnnnnnnnnnnnnnnnnnnnnnnnnnnnnnnnnnnnnnnnnnnnnnnnnnnnnnnnnnnnnnnnnnnnnnnnnnnnnnnnnnnnnnnnnnnnnnnnnnnnnnnnnnnnnnnnnnnnnnnnnnnnnnnnnnnnnnnnnnnnnnnnnnnnnnnnnnnnnnnnnnnnnnnnnnnnnnnnnnnnnnnnnnnnnnnnnnnnnnnnnnnnnnnnnnnnnnnnnnnnnnnnnnnnnnnnnnnnnnnnnnnnnnnnnnnnnnnnnnnnnnnnnnnnnnnnnnnnnnnnnnnnnnnnnnnnnnnnnnnnnnnnnnnnnnnnnnnnnnnnnnnnnnnnnnnnnnnnnnnnnnnnnnnnnnnnnnnnnnnnnnnnnnnnnnnnnnnnnnnnnnnnnnnnnnnnnnnnnnnnnnnnnnnnnnnnnnnnnnnnnnnnnnnnnnnnnnnnnnnnnnnnnnnnnnnnnnnnnnnnnnnnnnnnnnnnnnnnnnnnnnnnnnnnnnnnnnnnnnnnnnnnnnnnnnnnnnnnnnnnnnnnnnnnnnnnnnnnnnnnnnnnnnnnnnnnnnnnnnnnnnnnnnnnnnnnnnnnnnnnnnnnnnnnnnnnnnnnnnnnnnnnnnnnnnnnnnnnnnnnnnnnnnnnnnnnnnnnnnnnnnnnnnnnnnnnnnnnnnnnnnnnnnnnnnnnnnnnnnnnnnnnnnnnnnnnnnnnnnnnnnnnnnnnnnnnnnnnnnnnnnnnnnnnnnnnnnnnnnnnnnnnnnnnnnnnnnnnnnnnnnnnnnnnnnnnnnnnnnnnnnnnnnnnnnnnnnnnnnnnnnnnnnnnnnnnnnnnnnnnnnnnnnnnnnnnnnnnnnnnnnnnnnnnnnnnnnnnnnnnnnnnnnnnnnnnnnnnnnnnnnnnnnnnnnnnnnnnnnnnnnnnnnnnnnnnnnnnnnnnnnnnnnnnnnnnnnnnnnnnnnnnnnnnnnnnnnnnnnnnnnnnnnnnnnnnnnnnnnnnnnnnnnnnnnnnnnnnnnnnnnnnnnnnnnnnnnnnnnnnnnnnnnnnnnnnnnnnnnnnnnnnnnnnnnnnnnnnnnnnnnnnnnnnnnnnnnnnnnnnnnnnnnnnnnnnnnnnnnnnnnnnnnnnnnnnnnnnnnnnnnnnnnnnnnnnnnnnnnnnnnnnnnnnnnnnnnnnnnnnnnnnnnnnnnnnnnnnnnnnnnnnnnnnnnnnnnnnnnnnnnnnnnnnnnnnnnnnnnnnnnnnnnnnnnnnnnnnnnnnnnnnnnnnnnnnnnnnnnnnnnnnnnnnnnnnnnnnnnnnnnnnnnnnnnnnnnnnnnnnnnnnnnnnnnnnnnnnnnnnnnnnnnnnnnnnnnnnnnnnnnnnnnnnnnnnnnnnnnnnnnnnnnnnnnnnnnnnnnnnnnnnnnnnnnnnnnnnnnnnnnnnnnnnnnnnnnnnnnnnnnnnnnnnnnnnnnnnnnnnnnnnnnnnnnnnnnnnnnnnnnnnnnnnnnnnnnnnnnnnnnnnnnnnnnnnnnnnnnnnnnnnnnnnnnnnnnnnnnnnnnnnnnnnnnnnnnnnnnnnnnnnnnnnnnnnnnnnnnnnnnnnnnnnnnnnnnnnnnnnnnnnnnnnnnnnnnnnnnnnnnnnnnnnnnnnnnnnnnnnnnnnnnnnnnnnnnnnnnnnnnnnnnnnnnnnnnnnnnnnnnnnnnnnnnnnnnnnnnnnnnnnnnnnnnnnnnnnnnnnnnnnnnnnnnnnnnnnnnnnnnnnnnnnnnnnnnnnnnnnnnnnnnnnnnnnnnnnnnnnnnnnnnnnnnnnnnnnnnnnnnnnnnnnnnnnnnnnnnnnnnnnnnnnnnnnnnnnnnnnnnnnnnnnnnnnnnnnnnnnnnnnnnnnnnnnnnnnnnnnnnnnnnnnnnnnnnnnnnnnnnnnnnnnnnnnnnnnnnnnnnnnnnnnnnnnnnnnnnnnnnnnnnnnnnnnnnnnnnnnnnnnnnnnnnnnnnnnnnnnnnnnnnnnnnnnnnnnnnnnnnnnnnnnnnnnnnnnnnnnnnnnnnnnnnnnnnnnnnnnnnnnnnnnnnnnnnnnnnnnnnnnnnnnnnnnnnnnnnnnnnnnnnnnnnnnnnnnnnnnnnnnnnnnnnnnnnnnnnnnnnnnnnnnnnnnnnnnnnnnnnnnnnnnnnnnnnnnnnnnnnnnnnnnnnnnnnnnnnnnnnnnnnnnnnnnnnnnnnnnnnnnnnnnnnnnnnnnnnnnnnnnnnnnnnnnnnnnnnnnnnnnnnnnnnnnnnnnnnnnnnnnnnnnnnnnnnnnnnnnnnnnnnnnnnnnnnnnnnnnnnnnnnnnnnnnnnnnnnnnnnnnnnnnnnnnnnnnnnnnnnnnnnnnnnnnnnnnnnnnnnnnnnnnnnnnnnnnnnnnnnnnnnnnnnnnnnnnnnnnnnnnnnnnnnnnnnnnnnnnnnnnnnnnnnnnnnnnnnnnnnnnnnnnnnnnnnnnnnnnnnnnnnnnnnnnnnnnnnnnnnnnnnnnnnnnnnnnnnnnnnnnnnnnnnnnnnnnnnnnnnnnnnnnnnnnnnnnnnnnnnnnnnnnnnnnnnnnnnnnnnnnnnnnnnnnnnnnnnnnnnnnnnnnnnnnnnnnnnnnnnnnnnnnnnnnnnnnnnnnnnnnnnnnnnnnnnnnnnnnnnnnnnnnnnnnnnnnnnnnnnnnnnnnnnnnnnnnnnnnnnnnnnnnnnnnnnnnnnnnnnnnnnnnnnnnnnnnnnnnnnnnnnnnnnnnnnnnnnnnnnnnnnnnnnnnnnnnnnnnnnnnnnnnnnnnnnnnnnnnnnnnnnnnnnnnnnnnnnnnnnnnnnnnnnnnnnnnnnnnnnnnnnnnnnnnnnnnnnnnnnnnnnnnnnnnnnnnnnnnnnnnnnnnnnnnnnnnnnnnnnnnnnnnnnnnnnnnnnnnnnnnnnnnnnnnnnnnnnnnnnnnnnnnnnnnnnnnnnnnnnnnnnnnnnnnnnnnnnnnnnnnnnnnnnnnnnnnnnnnnnnnnnnnnnnnnnnnnnnnnnnnnnnnnnnnnnnnnnnnnnnnnnnnnnnnnnnnnnnnnnnnnnnnnnnnnnnnnnnnnnnnnnnnnnnnnnnnnnnnnnnnnnnnnnnnnnnnnnnnnnnnnnnnnnnnnnnnnnnnnnnnnnnnnnnnnnnnnnnnnnnnnnnnnnnnnnnnnnnnnnnnnnnnnnnnnnnnnnnnnnnnnnnnnnnnnnnnnnnnnnnnnnnnnnnnnnnnnnnnnnnnnnnnnnnnnnnnnnnnnnnnnnnnnnnnnnnnnnnnnnnnnnnnnnnnnnnnnnnnnnnnnnnnnnnnnnnnnnnnnnnnnnnnnnnnnnnnnnnnnnnnnnnnnnnnnnnnnnnnnnnnnnnnnnnnnnnnnnnnnnnnnnnnnnnnnnnnnnnnnnnnnnnnnnnnnnnnnnnnnnnnnnnnnnnnnnnnnnnnnnnnnnnnnnnnnnnnnnnnnnnnnnnnnnnnnnnnnnnnnnnnnnnnnnnnnnnnnnnnnnnnnnnnnnnnnnnnnnnnnnnnnnnnnnnnnnnnnnnnnnnnnnnnnnnnnnnnnnnnnnnnnnnnnnnnnnnnnnnnnnnnnnnnnnnnnnnnnnnnnnnnnnnnnnnnnnnnnnnnnnnnnnnnnnnnnnnnnnnnnnnnnnnnnnnnnnnnnnnnnnnnnnnnnnnnnnnnnnnnnnnnnnnnnnnnnnnnnnnnnnnnnnnnnnnnnnnnnnnnnnnnnnnnnnnnnnnnnnnnnnnnnnnnnnnnnnnnnnnnnnnnnnnnnnnnnnnnnnnnnnnnnnnnnnnnnnnnnnnnnnnnnnnnnnnnnnnnnnnnnnnnnnnnnnnnnnnnnnnnnnnnnnnnnnnnnnnnnnnnnnnnnnnnnnnnnnnnnnnnnnnnnnnnnnnnnnnnnnnnnnnnnnnnnnnnnnnnnnnnnnnnnnnnnnnnnnnnnnnnnnnnnnnnnnnnnnnnnnnnnnnnnnnnnnnnnnnnnnnnnnnnnnnnnnnnnnnnnnnnnnnnnnnnnnnnnnnnnnnnnnnnnnnnnnnnnnnnnnnnnnnnnnnnnnnnnnnnnnnnnnnnnnnnnnnnnnnnnnnnnnnnnnnnnnnnnnnnnnnnnnnnnnnnnnnnnnnnnnnnnnnnnnnnnnnnnnnnnnnnnnnnnnnnnnnnnnnnnnnnnnnnnnnnnnnnnnnnnnnnnnnnnnnnnnnnnnnnnnnnnnnnnnnnnnnnnnnnnnnnnnnnnnnnnnnnnnnnnnnnnnnnnnnnnnnnnnnnnnnnnnnnnnnnnnnnnnnnnnnnnnnnnnnnnnnnnnnnnnnnnnnnnnnnnnnnnnnnnnnnnnnnnnnnnnnnnnnnnnnnnnnnnnnnnnnnnnnnnnnnnnnnnnnnnnnnnnnnnnnnnnnnnnnnnnnnnnnnnnnnnnnnnnnnnnnnnnnnnnnnnnnnnnnnnnnnnnnnnnnnnnnnnnnnnnnnnnnnnnnnnnnnnnnnnnnnnnnnnnnnnnnnnnnnnnnnnnnnnnnnnnnnnnnnnnnnnnnnnnnnnnnnnnnnnnnnnnnnnnnnnnnnnnnnnnnnnnnnnnnnnnnnnnnnnnnnnnnnnnnnnnnnnnnnnnnnnnnnnnnnnnnnnnnnnnnnnnnnnnnnnnnnnnnnnnnnnnnnnnnnnnnnnnnnnnnnnnnnnnnnnnnnnnnnnnnnnnnnnnnnnnnnnnnnnnnnnnnnnnnnnnnnnnnnnnnnnnnnnnnnnnnnnnnnnnnnnnnnnnnnnnnnnnnnnnnnnnnnnnnnnnnnnnnnnnnnnnnnnnnnnnnnnnnnnnnnnnnnnnnnnnnnnnnnnnnnnnnnnnnnnnnnnnnnnnnnnnnnnnnnnnnnnnnnnnnnnnnnnnnnnnnnnnnnnnnnnnnnnnnnnnnnnnnnnnnnnnnnnnnnnnnnnnnnnnnnnnnnnnnnnnnnnnnnnnnnnnnnnnnnnnnnnnnnnnnnnnnnnnnnnnnnnnnnnnnnnnnnnnnnnnnnnnnnnnnnnnnnnnnnnnnnnnnnnnnnnnnnnnnnnnnnnnnnnnnnnnnnnnnnnnnnnnnnnnnnnnnnnnnnnnnnnnnnnnnnnnnnnnnnnnnnnnnnnnnnnnnnnnnnnnnnnnnnnnnnnnnnnnnnnnnnnnnnnnnnnnnnnnnnnnnnnnnnnnnnnnnnnnnnnnnnnnnnnnnnnnnnnnnnnnnnnnnnnnnnnnnnnnnnnnnnnnnnnnnnnnnnnnnnnnnnnnnnnnnnnnnnnnnnnnnnnnnnnnnnnnnnnnnnnnnnnnnnnnnnnnnnnnnnnnnnnnnnnnnnnnnnnnnnnnnnnnnnnnnnnnnnnnnnnnnnnnnnnnnnnnnnnnnnnnnnnnnnnnnnnnnnnnnnnnnnnnnnnnnnnnnnnnnnnnnnnnnnnnnnnnnnnnnnnnnnnnnnnnnnnnnnnnnnnnnnnnnnnnnnnnnnnnnnnnnnnnnnnnnnnnnnnnnnnnnnnnnnnnnnnnnnnnnnnnnnnnnnnnnnnnnnnnnnnnnnnnnnnnnnnnnnnnnnnnnnnnnnnnnnnnnnnnnnnnnnnnnnnnnnnnnnnnnnnnnnnnnnnnnnnnnnnnnnnnnnnnnnnnnnnnnnnnnnnnnnnnnnnnnnnnnnnnnnnnnnnnnnnnnnnnnnnnnnnnnnnnnnnnnnnnnnnnnnnnnnnnnnnnnnnnnnnnnnnnnnnnnnnnnnnnnnnnnnnnnnnnnnnnnnnnnnnnnnnnnnnnnnnnnnnnnnnnnnnnnnnnnnnnnnnnnnnnnnnnnnnnnnnnnnnnnnnnnnnnnnnnnnnnnnnnnnnnnnnnnnnnnnnnnnnnnnnnnnnnnnnnnnnnnnnnnnnnnnnnnnnnnnnnnnnnnnnnnnnnnnnnnnnnnnnnnnnnnnnnnnnnnnnnnnnnnnnnnnnnnnnnnnnnnnnnnnnnnnnnnnnnnnnnnnnnnnnnnnnnnnnnnnnnnnnnnnnnnnnnnnnnnnnnnnnnnnnnnnnnnnnnnnnnnnnnnnnnnnnnnnnnnnnnnnnnnnnnnnnnnnnnnnnnnnnnnnnnnnnnnnnnnnnnnnnnnnnnnnnnnnnnnnnnnnnnnnnnnnnnnnnnnnnnnnnnnnnnnnnnnnnnnnnnnnnnnnnnnnnnnnnnnnnnnnnnnnnnnnnnnnnnnnnnnnnnnnnnnnnnnnnnnnnnnnnnnnnnnnnnnnnnnnnnnnnnnnnnnnnnnnnnnnnnnnnnnnnnnnnnnnnnnnnnnnnnnnnnnnnnnnnnnnnnnnnnnnnnnnnnnnnnnnnnnnnnnnnnnnnnnnnnnnnnnnnnnnnnnnnnnnnnnnnnnnnnnnnnnnnnnnnnnnnnnnnnnnnnnnnnnnnnnnnnnnnnnnnnnnnnnnnnnnnnnnnnnnnnnnnnnnnnnnnnnnnnnnnnnnnnnnnnnnnnnnnnnnnnnnnnnnnnnnnnnnnnnnnnnnnnnnnnnnnnnnnnnnnnnnnnnnnnnnnnnnnnnnnnnnnnnnnnnnnnnnnnnnnnnnnnnnnnnnnnnnnnnnnnnnnnnnnnnnnnnnnnnnnnnnnnnnnnnnnnnnnnnnnnnnnnnnnnnnnnnnnnnnnnnnnnnnnnnnnnnnnnnnnnnnnnnnnnnnnnnnnnnnnnnnnnnnnnnnnnnnnnnnnnnnnnnnnnnnnnnnnnnnnnnnnnnnnnnnnnnnnnnnnnnnnnnnnnnnnnnnnnnnnnnnnnnnnnnnnnnnnnnnnnnnnnnnnnnnnnnnnnnnnnnnnnnnnnnnnnnnnnnnnnnnnnnnnnnnnnnnnnnnnnnnnnnnnnnnnnnnnnnnnnnnnnnnnnnnnnnnnnnnnnnnnnnnnnnnnnnnnnnnnnnnnnnnnnnnnnnnnnnnnnnnnnnnnnnnnnnnnnnnnnnnnnnnnnnnnnnnnnnnnnnnnnnnnnnnnnnnnnnnnnnnnnnnnnnnnnnnnnnnnnnnnnnnnnnnnnnnnnnnnnnnnnnnnnnnnnnnnnnnnnnnnnnnnnnnnnnnnnnnnnnnnnnnnnnnnnnnnnnnnnnnnnnnnnnnnnnnnnnnnnnnnnnnnnnnnnnnnnnnnnnnnnnnnnnnnnnnnnnnnnnnnnnnnnnnnnnnnnnnnnnnnnnnnnnnnnnnnnnnnnnnnnnnnnnnnnnnnnnnnnnnnnnnnnnnnnnnnnnnnnnnnnnnnnnnnnnnnnnnnnnnnnnnnnnnnnnnnnnnnnnnnnnnnnnnnnnnnnnnnnnnnnnnnnnnnnnnnnnnnnnnnnnnnnnnnnnnnnnnnnnnnnnnnnnnnnnnnnnnnnnnnnnnnnnnnnnnnnnnnnnnnnnnnnnnnnnnnnnnnnnnnnnnnnnnnnnnnnnnnnnnnnnnnnnnnnnnnnnnnnnnnnnnnnnnnnnnnnnnnnnnnnnnnnnnnnnnnnnnnnnnnnnnnnnnnnnnnnnnnnnnnnnnnnnnnnnnnnnnnnnnnnnnnnnnnnnnnnnnnnnnnnnnnnnnnnnnnnnnnnnnnnnnnnnnnnnnnnnnnnnnnnnnnnnnnnnnnnnnnnnnnnnnnnnnnnnnnnnnnnnnnnnnnnnnnnnnnnnnnnnnnnnnnnnnnnnnnnnnnnnnnnnnnnnnnnnnnnnnnnnnnnnnnnnnnnnnnnnnnnnnnnnnnnnnnnnnnnnnnnnnnnnnnnnnnnnnnnnnnnnnnnnnnnnnnnnnnnnnnnnnnnnnnnnnnnnnnnnnnnnnnnnnnnnnnnnnnnnnnnnnnnnnnnnnnnnnnnnnnnnnnnnnnnnnnnnnnnnnnnnnnnnnnnnnnnnnnnnnnnnnnnnnnnnnnnnnnnnnnnnnnnnnnnnnnnnnnnnnnnnnnnnnnnnnnnnnnnnnnnnnnnnnnnnnnnnnnnnnnnnnnnnnnnnnnnnnnnnnnnnnnnnnnnnnnnnnnnnnnnnnnnnnnnnnnnnnnnnnnnnnnnnnnnnnnnnnnnnnnnnnnnnnnnnnnnnnnnnnnnnnnnnnnnnnnnnnnnnnnnnnnnnnnnnnnnnnnnnnnnnnnnnnnnnnnnnnnnnnnnnnnnnnnnnnnnnnnnnnnnnnnnnnnnnnnnnnnnnnnnnnnnnnnnnnnnnnnnnnnnnnnnnnnnnnnnnnnnnnnnnnnnnnnnnnnnnnnnnnnnnnnnnnnnnnnnnnnnnnnnnnnnnnnnnnnnnnnnnnnnnnnnnnnnnnnnnnnnnnnnnnnnnnnnnnnnnnnnnnnnnnnnnnnnnnnnnnnnnnnnnnnnnnnnnnnnnnnnnnnnnnnnnnnnnnnnnnnnnnnnnnnnnnnnnnnnnnnnnnnnnnnnnnnnnnnnnnnnnnnnnnnnnnnnnnnnnnnnnnnnnnnnnnnnnnnnnnnnnnnnnnnnnnnnnnnnnnnnnnnnnnnnnnnnnnnnnnnnnnnnnnnnnnnnnnnnnnnnnnnnnnnnnnnnnnnnnnnnnnnnnnnnnnnnnnnnnnnnnnnnnnnnnnnnnnnnnnnnnnnnnnnnnnnnnnnnnnnnnnnnnnnnnnnnnnnnnnnnnnnnnnnnnnnnnnnnnnnnnnnnnnnnnnnnnnnnnnnnnnnnnnnnnnnnnnnnnnnnnnnnnnnnnnnnnnnnnnnnnnnnnnnnnnnnnnnnnnnnnnnnnnnnnnnnnnnnnnnnnnnnnnnnnnnnnnnnnnnnnnnnnnnnnnnnnnnnnnnnnnnnnnnnnnnnnnnnnnnnnnnnnnnnnnnnnnnnnnnnnnnnnnnnnnnnnnnnnnnnnnnnnnnnnnnnnnnnnnnnnnnnnnnnnnnnnnnnnnnnnnnnnnnnnnnnnnnnnnnnnnnnnnnnnnnnnnnnnnnnnnnnnnnnnnnnnnnnnnnnnnnnnnnnnnnnnnnnnnnnnnnnnnnnnnnnnnnnnnnnnnnnnnnnnnnnnnnnnnnnnnnnnnnnnnnnnnnnnnnnnnnnnnnnnnnnnnnnnnnnnnnnnnnnnnnnnnnnnnnnnnnnnnnnnnnnnnnnnnnnnnnnnnnnnnnnnnnnnnnnnnnnnnnnnnnnnnnnnnnnnnnnnnnnnnnnnnnnnnnnnnnnnnnnnnnnnnnnnnnnnnnnnnnnnnnnnnnnnnnnnnnnnnnnnnnnnnnnnnnnnnnnnnnnnnnnnnnnnnnnnnnnnnnnnnnnnnnnnnnnnnnnnnnnnnnnnnnnnnnnnnnnnnnnnnnnnnnnnnnnnnnnnnnnnnnnnnnnnnnnnnnnnnnnnnnnnnnnnnnnnnnnnnnnnnnnnnnnnnnnnnnnnnnnnnnnnnnnnnnnnnnnnnnnnnnnnnnnnnnnnnnnnnnnnnnnnnnnnnnnnnnnnnnnnnnnnnnnnnnnnnnnnnnnnnnnnnnnnnnnnnnnnnnnnnnnnnnnnnnnnnnnnnnnnnnnnnnnnnnnnnnnnnnnnnnnnnnnnnnnnnnnnnnnnnnnnnnnnnnnnnnnnnnnnnnnnnnnnnnnnnnnnnnnnnnnnnnnnnnnnnnnnnnnnnnnnnnnnnnnnnnnnnnnnnnnnnnnnnnnnnnnnnnnnnnnnnnnnnnnnnnnnnnnnnnnnnnnnnnnnnnnnnnnnnnnnnnnnnnnnnnnnnnnnnnnnnnnnnnnnnnnnnnnnnnnnnnnnnnnnnnnnnnnnnnnnnnnnnnnnnnnnnnnnnnnnnnnnnnnnnnnnnnnnnnnnnnnnnnnnnnnnnnnnnnnnnnnnnnnnnnnnnnnnnnnnnnnnnnnnnnnnnnnnnnnnnnnnnnnnnnnnnnnnnnnnnnnnnnnnnnnnnnnnnnnnnnnnnnnnnnnnnnnnnnnnnnnnnnnnnnnnnnnnnnnnnnnnnnnnnnnnnnnnnnnnnnnnnnnnnnnnnnnnnnnnnnnnnnnnnnnnnnnnnnnnnnnnnnnnnnnnnnnnnnnnnnnnnnnnnnnnnnnnnnnnnnnnnnnnnnnnnnnnnnnnnnnnnnnnnnnnnnnnnnnnnnnnnnnnnnnnnnnnnnnnnnnnnnnnnnnnnnnnnnnnnnnnnnnnnnnnnnnnnnnnnnnnnnnnnnnnnnnnnnnnnnnnnnnnnnnnnnnnnnnnnnnnnnnnnnnnnnnnnnnnnnnnnnnnnnnnnnnnnnnnnnnnnnnnnnnnnnnnnnnnnnnnnnnnnnnnnnnnnnnnnnnnnnnnnnnnnnnnnnnnnnnnnnnnnnnnnnnnnnnnnnnnnnnnnnnnnnnnnnnnnnnnnnnnnnnnnnnnnnnnnnnnnnnnnnnnnnnnnnnnnnnnnnnnnnnnnnnnnnnnnnnnnnnnnnnnnnnnnnnnnnnnnnnnnnnnnnnnnnnnnnnnnnnnnnnnnnnnnnnnnnnnnnnnnnnnnnnnnnnnnnnnnnnnnnnnnnnnnnnnnnnnnnnnnnnnnnnnnnnnnnnnnnnnnnnnnnnnnnnnnnnnnnnnnnnnnnnnnnnnnnnnnnnnnnnnnnnnnnnnnnnnnnnnnnnnnnnnnnnnnnnnnnnnnnnnnnnnnnnnnnnnnnnnnnnnnnnnnnnnnnnnnnnnnnnnnnnnnnnnnnnnnnnnnnnnnnnnnnnnnnnnnnnnnnnnnnnnnnnnnnnnnnnnnnnnnnnnnnnnnnnnnnnnnnnnnnnnnnnnnnnnnnnnnnnnnnnnnnnnnnnnnnnnnnnnnnnnnnnnnnnnnnnnnnnnnnnnnnnnnnnnnnnnnnnnnnnnnnnnnnnnnnnnnnnnnnnnnnnnnnnnnnnnnnnnnnnnnnnnnnnnnnnnnnnnnnnnnnnnnnnnnnnnnnnnnnnnnnnnnnnnnnnnnnnnnnnnnnnnnnnnnnnnnnnnnnnnnnnnnnnnnnnnnnnnnnnnnnnnnnnnnnnnnnnnnnnnnnnnnnnnnnnnnnnnnnnnnnnnnnnnnnnnnnnnnnnnnnnnnnnnnnnnnnnnnnnnnnnnnnnnnnnnnnnnnnnnnnnnnnnnnnnnnnnnnnnnnnnnnnnnnnnnnnnnnnnnnnnnnnnnnnnnnnnnnnnnnnnnnnnnnnnnnnnnnnnnnnnnnnnnnnnnnnnnnnnnnnnnnnnnnnnnnnnnnnnnnnnnnnnnnnnnnnnnnnnnnnnnnnnnnnnnnnnnnnnnnnnnnnnnnnnnnnnnnnnnnnnnnnnnnnnnnnnnnnnnnnnnnnnnnnnnnnnnnnnnnnnnnnnnnnnnnnnnnnnnnnnnnnnnnnnnnnnnnnnnnnnnnnnnnnnnnnnnnnnnnnnnnnnnnnnnnnnnnnnnnnnnnnnnnnnnnnnnnnnnnnnnnnnnnnnnnnnnnnnnnnnnnnnnnnnnnnnnnnnnnnnnnnnnnnnnnnnnnnnnnnnnnnnnnnnnnnnnnnnnnnnnnnnnnnnnnnnnnnnnnnnnnnnnnnnnnnnnnnnnnnnnnnnnnnnnnnnnnnnnnnnnnnnnnnnnnnnnnnnnnnnnnnnnnnnnnnnnnnnnnnnnnnnnnnnnnnnnnnnnnnnnnnnnnnnnnnnnnnnnnnnnnnnnnnnnnnnnnnnnnnnnnnnnnnnnnnnnnnnnnnnnnnnnnnnnnnnnnnnnnnnnnnnnnnnnnnnnnnnnnnnnnnnnnnnnnnnnnnnnnnnnnnnnnnnnnnnnnnnnnnnnnnnnnnnnnnnnnnnnnnnnnnnnnnnnnnnnnnnnnnnnnnnnnnnnnnnnnnnnnnnnnnnnnnnnnnnnnnnnnnnnnnnnnnnnnnnnnnnnnnnnnnnnnnnnnnnnnnnnnnnnnnnnnnnnnnnnnnnnnnnnnnnnnnnnnnnnnnnnnnnnnnnnnnnnnnnnnnnnnnnnnnnnnnnnnnnnnnnnnnnnnnnnnnnnnnnnnnnnnnnnnnnnnnnnnnnnnnnnnnnnnnnnnnnnnnnnnnnnnnnnnnnnnnnnnnnnnnnnnnnnnnnnnnnnnnnnnnnnnnnnnnnnnnnnnnnnnnnnnnnnnnnnnnnnnnnnnnnnnnnnnnnnnnnnnnnnnnnnnnnnnnnnnnnnnnnnnnnnnnnnnnnnnnnnnnnnnnnnnnnnnnnnnnnnnnnnnnnnnnnnnnnnnnnnnnnnnnnnnnnnnnnnnnnnnnnnnnnnnnnnnnnnnnnnnnnnnnnnnnnnnnnnnnnnnnnnnnnnnnnnnnnnnnnnnnnnnnnnnnnnnnnnnnnnnnnnnnnnnnnnnnnnnnnnnnnnnnnnnnnnnnnnnnnnnnnnnnnnnnnnnnnnnnnnnnnnnnnnnnnnnnnnnnnnnnnnnnnnnnnnnnnnnnnnnnnnnnnnnnnnnnnnnnnnnnnnnnnnnnnnnnnnnnnnnnnnnnnnnnnnnnnnnnnnnnnnnnnnnnnnnnnnnnnnnnnnnnnnnnnnnnnnnnnnnnnnnnnnnnnnnnnnnnnnnnnnnnnnnnnnnnnnnnnnnnnnnnnnnnnnnnnnnnnnnnnnnnnnnnnnnnnnnnnnnnnnnnnnnnnnnnnnnnnnnnnnnnnnnnnnnnnnnnnnnnnnnnnnnnnnnnnnnnnnnnnnnnnnnnnnnnnnnnnnnnnnnnnnnnnnnnnnnnnnnnnnnnnnnnnnnnnnnnnnnnnnnnnnnnnnnnnnnnnnnnnnnnnnnnnnnnnnnnnnnnnnnnnnnnnnnnnnnnnnnnnnnnnnnnnnnnnnnnnnnnnnnnnnnnnnnnnnnnnnnnnnnnnnnnnnnnnnnnnnnnnnnnnnnnnnnnnnnnnnnnnnnnnnnnnnnnnnnnnnnnnnnnnnnnnnnnnnnnnnnnnnnnnnnnnnnnnnnnnnnnnnnnnnnnnnnnnnnnnnnnnnnnnnnnnnnnnnnnnnnnnnnnnnnnnnnnnnnnnnnnnnnnnnnnnnnnnnnnnnnnnnnnnnnnnnnnnnnnnnnnnnnnnnnnnnnnnnnnnnnnnnnnnnnnnnnnnnnnnnnnnnnnnnnnnnnnnnnnnnnnnnnnnnnnnnnnnnnnnnnnnnnnnnnnnnnnnnnnnnnnnnnnnnnnnnnnnnnnnnnnnnnnnnnnnnnnnnnnnnnnnnnnnnnnnnnnnnnnnnnnnnnnnnnnnnnnnnnnnnnnnnnnnnnnnnnnnnnnnnnnnnnnnnnnnnnnnnnnnnnnnnnnnnnnnnnnnnnnnnnnnnnnnnnnnnnnnnnnnnnnnnnnnnnnnnnnnnnnnnnnnnnnnnnnnnnnnnnnnnnnnnnnnnnnnnnnnnnnnnnnnnnnnnnnnnnnnnnnnnnnnnnnnnnnnnnnnnnnnnnnnnnnnnnnnnnnnnnnnnnnnnnnnnnnnnnnnnnnnnnnnnnnnnnnnnnnnnnnnnnnnnnnnnnnnnnnnnnnnnnnnnnnnnnnnnnnnnnnnnnnnnnnnnnnnnnnnnnnnnnnnnnnnnnnnnnnnnnnnnnnnnnnnnnnnnnnnnnnnnnnnnnnnnnnnnnnnnnnnnnnnnnnnnnnnnnnnnnnnnnnnnnnnnnnnnnnnnnnnnnnnnnnnnnnnnnnnnnnnnnnnnnnnnnnnnnnnnnnnnnnnnnnnnnnnnnnnnnnnnnnnnnnnnnnnnnnnnnnnnnnnnnnnnnnnnnnnnnnnnnnnnnnnnnnnnnnnnnnnnnnnnnnnnnnnnnnnnnnnnnnnnnnnnnnnnnnnnnnnnnnnnnnnnnnnnnnnnnnnnnnnnnnnnnnnnnnnnnnnnnnnnnnnnnnnnnnnnnnnnnnnnnnnnnnnnnnnnnnnnnnnnnnnnnnnnnnnnnnnnnnnnnnnnnnnnnnnnnnnnnnnnnnnnnnnnnnnnnnnnnnnnnnnnnnnnnnnnnnnnnnnnnnnnnnnnnnnnnnnnnnnnnnnnnnnnnnnnnnnnnnnnnnnnnnnnnnnnnnnnnnnnnnnnnnnnnnnnnnnnnnnnnnnnnnnnnnnnnnnnnnnnnnnnnnnnnnnnnnnnnnnnnnnnnnnnnnnnnnnnnnnnnnnnnnnnnnnnnnnnnnnnnnnnnnnnnnnnnnnnnnnnnnnnnnnnnnnnnnnnnnnnnnnnnnnnnnnnnnnnnnnnnnnnnnnnnnnnnnnnnnnnnnnnnnnnnnnnnnnnnnnnnnnnnnnnnnnnnnnnnnnnnnnnnnnnnnnnnnnnnnnnnnnnnnnnnnnnnnnnnnnnnnnnnnnnnnnnnnnnnnnnnnnnnnnnnnnnnnnnnnnnnnnnnnnnnnnnnnnnnnnnnnnnnnnnnnnnnnnnnnnnnnnnnnnnnnnnnnnnnnnnnnnnnnnnnnnnnnnnnnnnnnnnnnnnnnnnnnnnnnnnnnnnnnnnnnnnnnnnnnnnnnnnnnnnnnnnnnnnnnnnnnnnnnnnnnnnnnnnnnnnnnnnnnnnnnnnnnnnnnnnnnnnnnnnnnnnnnnnnnnnnnnnnnnnnnnnnnnnnnnnnnnnnnnnnnnnnnnnnnnnnnnnnnnnnnnnnnnnnnnnnnnnnnnnnnnnnnnnnnnnnnnnnnnnnnnnnnnnnnnnnnnnnnnnnnnnnnnnnnnnnnnnnnnnnnnnnnnnnnnnnnnnnnnnnnnnnnnnnnnnnnnnnnnnnnnnnnnnnnnnnnnnnnnnnnnnnnnnnnnnnnnnnnnnnnnnnnnnnnnnnnnnnnnnnnnnnnnnnnnnnnnnnnnnnnnnnnnnnnnnnnnnnnnnnnnnnnnnnnnnnnnnnnnnnnnnnnnnnnnnnnnnnnnnnnnnnnnnnnnnnnnnnnnnnnnnnnnnnnnnnnnnnnnnnnnnnnnnnnnnnnnnnnnnnnnnnnnnnnnnnnnnnnnnnnnnnnnnnnnnnnnnnnnnnnnnnnnnnnnnnnnnnnnnnnnnnnnnnnnnnnnnnnnnnnnnnnnnnnnnnnnnnnnnnnnnnnnnnnnnnnnnnnnnnnnnnnnnnnnnnnnnnnnnnnnnnnnnnnnnnnnnnnnnnnnnnnnnnnnnnnnnnnnnnnnnnnnnnnnnnnnnnnnnnnnnnnnnnnnnnnnnnnnnnnnnnnnnnnnnnnnnnnnnnnnnnnnnnnnnnnnnnnnnnnnnnnnnnnnnnnnnnnnnnnnnnnnnnnnnnnnnnnnnnnnnnnnnnnnnnnnnnnnnnnnnnnnnnnnnnnnnnnnnnnnnnnnnnnnnnnnnnnnnnnnnnnnnnnnnnnnnnnnnnnnnnnnnnnnnnnnnnnnnnnnnnnnnnnnnnnnnnnnnnnnnnnnnnnnnnnnnnnnnnnnnnnnnnnnnnnnnnnnnnnnnnnnnnnnnnnnnnnnnnnnnnnnnnnnnnnnnnnnnnnnnnnnnnnnnnnnnnnnnnnnnnnnnnnnnnnnnnnnnnnnnnnnnnnnnnnnnnnnnnnnnnnnnnnnnnnnnnnnnnnnnnnnnnnnnnnnnnnnnnnnnnnnnnnnnnnnnnnnnnnnnnnnnnnnnnnnnnnnnnnnnnnnnnnnnnnnnnnnnnnnnnnnnnnnnnnnnnnnnnnnnnnnnnnnnnnnnnnnnnnnnnnnnnnnnnnnnnnnnnnnnnnnnnnnnnnnnnnnnnnnnnnnnnnnnnnnnnnnnnnnnnnnnnnnnnnnnnnnnnnnnnnnnnnnnnnnnnnnnnnnnnnnnnnnnnnnnnnnnnnnnnnnnnnnnnnnnnnnnnnnnnnnnnnnnnnnnnnnnnnnnnnnnnnnnnnnnnnnnnnnnnnnnnnnnnnnnnnnnnnnnnnnnnnnnnnnnnnnnnnnnnnnnnnnnnnnnnnnnnnnnnnnnnnnnnnnnnnnnnnnnnnnnnnnnnnnnnnnnnnnnnnnnnnnnnnnnnnnnnnnnnnnnnnnnnnnnnnnnnnnnnnnnnnnnnnnnnnnnnnnnnnnnnnnnnnnnnnnnnnnnnnnnnnnnnnnnnnnnnnnnnnnnnnnnnnnnnnnnnnnnnnnnnnnnnnnnnnnnnnnnnnnnnnnnnnnnnnnnnnnnnnnnnnnnnnnnnnnnnnnnnnnnnnnnnnnnnnnnnnnnnnnnnnnnnnnnnnnnnnnnnnnnnnnnnnnnnnnnnnnnnnnnnnnnnnnnnnnnnnnnnnnnnnnnnnnnnnnnnnnnnnnnnnnnnnnnnnnnnnnnnnnnnnnnnnnnnnnnnnnnnnnnnnnnnnnnnnnnnnnnnnnnnnnnnnnnnnnnnnnnnnnnnnnnnnnnnnnnnnnnnnnnnnnnnnnnnnnnnnnnnnnnnnnnnnnnnnnnnnnnnnnnnnnnnnnnnnnnnnnnnnnnnnnnnnnnnnnnnnnnnnnnnnnnnnnnnnnnnnnnnnnnnnnnnnnnnnnnnnnnnnnnnnnnnnnnnnnnnnnnnnnnnnnnnnnnnnnnnnnnnnnnnnnnnnnnnnnnnnnnnnnnnnnnnnnnnnnnnnnnnnnnnnnnnnnnnnnnnnnnnnnnnnnnnnnnnnnnnnnnnnnnnnnnnnnnnnnnnnnnnnnnnnnnnnnnnnnnnnnnnnnnnnnnnnnnnnnnnnnnnnnnnnnnnnnnnnnnnnnnnnnnnnnnnnnnnnnnnnnnnnnnnnnnnnnnnnnnnnnnnnnnnnnnnnnnnnnnnnnnnnnnnnnnnnnnnnnnnnnnnnnnnnnnnnnnnnnnnnnnnnnnnnnnnnnnnnnnnnnnnnnnnnnnnnnnnnnnnnnnnnnnnnnnnnnnnnnnnnnnnnnnnnnnnnnnnnnnnnnnnnnnnnnnnnnnnnnnnnnnnnnnnnnnnnnnnnnnnnnnnnnnnnnnnnnnnnnnnnnnnnnnnnnnnnnnnnnnnnnnnnnnnnnnnnnnnnnnnnnnnnnnnnnnnnnnnnnnnnnnnnnnnnnnnnnnnnnnnnnnnnnnnnnnnnnnnnnnnnnnnnnnnnnnnnnnnnnnnnnnnnnnnnnnnnnnnnnnnnnnnnnnnnnnnnnnnnnnnnnnnnnnnnnnnnnnnnnnnnnnnnnnnnnnnnnnnnnnnnnnnnnnnnnnnnnnnnnnnnnnnnnnnnnnnnnnnnnnnnnnnnnnnnnnnnnnnnnnnnnnnnnnnnnnnnnnnnnnnnnnnnnnnnnnnnnnnnnnnnnnnnnnnnnnnnnnnnnnnnnnnnnnnnnnnnnnnnnnnnnnnnnnnnnnnnnnnnnnnnnnnnnnnnnnnnnnnnnnnnnnnnnnnnnnnnnnnnnnnnnnnnnnnnnnnnnnnnnnnnnnnnnnnnnnnnnnnnnnnnnnnnnnnnnnnnnnnnnnnnnnnnnnnnnnnnnnnnnnnnnnnnnnnnnnnnnnnnnnnnnnnnnnnnnnnnnnnnnnnnnnnnnnnnnnnnnnnnnnnnnnnnnnnnnnnnnnnnnnnnnnnnnnnnnnnnnnnnnnnnnnnnnnnnnnnnnnnnnnnnnnnnnnnnnnnnnnnnnnnnnnnnnnnnnnnnnnnnnnnnnnnnnnnnnnnnnnnnnnnnnnnnnnnnnnnnnnnnnnnnnnnnnnnnnnnnnnnnnnnnnnnnnnnnnnnnnnnnnnnnnnnnnnnnnnnnnnnnnnnnnnnnnnnnnnnnnnnnnnnnnnnnnnnnnnnnnnnnnnnnnnnnnnnnnnnnnnnnnnnnnnnnnnnnnnnnnnnnnnnnnnnnnnnnnnnnnnnnnnnnnnnnnnnnnnnnnnnnnnnnnnnnnnnnnnnnnnnnnnnnnnnnnnnnnnnnnnnnnnnnnnnnnnnnnnnnnnnnnnnnnnnnnnnnnnnnnnnnnnnnnnnnnnnnnnnnnnnnnnnnnnnnnnnnnnnnnnnnnnnnnnnnnnnnnnnnnnnnnnnnnnnnnnnnnnnnnnnnnnnnnnnnnnnnnnnnnnnnnnnnnnnnnnnnnnnnnnnnnnnnnnnnnnnnnnnnnnnnnnnnnnnnnnnnnnnnnnnnnnnnnnnnnnnnnnnnnnnnnnnnnnnnnnnnnnnnnnnnnnnnnnnnnnnnnnnnnnnnnnnnnnnnnnnnnnnnnnnnnnnnnnnnnnnnnnnnnnnnnnnnnnnnnnnnnnnnnnnnnnnnnnnnnnnnnnnnnnnnnnnnnnnnnnnnnnnnnnnnnnnnnnnnnnnnnnnnnnnnnnnnnnnnnnnnnnnnnnnnnnnnnnnnnnnnnnnnnnnnnnnnnnnnnnnnnnnnnnnnnnnnnnnnnnnnnnnnnnnnnnnnnnnnnnnnnnnnnnnnnnnnnnnnnnnnnnnnnnnnnnnnnnnnnnnnnnnnnnnnnnnnnnnnnnnnnnnnnnnnnnnnnnnnnnnnnnnnnnnnnnnnnnnnnnnnnnnnnnnnnnnnnnnnnnnnnnnnnnnnnnnnnnnnnnnnnnnnnnnnnnnnnnnnnnnnnnnnnnnnnnnnnnnnnnnnnnnnnnnnnnnnnnnnnnnnnnnnnnnnnnnnnnnnnnnnnnnnnnnnnnnnnnnnnnnnnnnnnnnnnnnnnnnnnnnnnnnnnnnnnnnnnnnnnnnnnnnnnnnnnnnnnnnnnnnnnnnnnnnnnnnnnnnnnnnnnnnnnnnnnnnnnnnnnnnnnnnnnnnnnnnnnnnnnnnnnnnnnnnnnnnnnnnnnnnnnnnnnnnnnnnnnnnnnnnnnnnnnnnnnnnnnnnnnnnnnnnnnnnnnnnnnnnnnnnnnnnnnnnnnnnnnnnnnnnnnnnnnnnnnnnnnnnnnnnnnnnnnnnnnnnnnnnnnnnnnnnnnnnnnnnnnnnnnnnnnnnnnnnnnnnnnnnnnnnnnnnnnnnnnnnnnnnnnnnnnnnnnnnnnnnnnnnnnnnnnnnnnnnnnnnnnnnnnnnnnnnnnnnnnnnnnnnnnnnnnnnnnnnnnnnnnnnnnnnnnnnnnnnnnnnnnnnnnnnnnnnnnnnnnnnnnnnnnnnnnnnnnnnnnnnnnnnnnnnnnnnnnnnnnnnnnnnnnnnnnnnnnnnnnnnnnnnnnnnnnnnnnnnnnnnnnnnnnnnnnnnnnnnnnnnnnnnnnnnnnnnnnnnnnnnnnnnnnnnnnnnnnnnnnnnnnnnnnnnnnnnnnnnnnnnnnnnnnnnnnnnnnnnnnnnnnnnnnnnnnnnnnnnnnnnnnnnnnnnnnnnnnnnnnnnnnnnnnnnnnnnnnnnnnnnnnnnnnnnnnnnnnnnnnnnnnnnnnnnnnnnnnnnnnnnnnnnnnnnnnnnnnnnnnnnnnnnnnnnnnnnnnnnnnnnnnnnnnnnnnnnnnnnnnnnnnnnnnnnnnnnnnnnnnnnnnnnnnnnnnnnnnnnnnnnnnnnnnnnnnnnnnnnnnnnnnnnnnnnnnnnnnnnnnnnnnnnnnnnnnnnnnnnnnnnnnnnnnnnnnnnnnnnnnnnnnnnnnnnnnnnnnnnnnnnnnnnnnnnnnnnnnnnnnnnnnnnnnnnnnnnnnnnnnnnnnnnnnnnnnnnnnnnnnnnnnnnnnnnnnnnnnnnnnnnnnnnnnnnnnnnnnnnnnnnnnnnnnnnnnnnnnnnnnnnnnnnnnnnnnnnnnnnnnnnnnnnnnnnnnnnnnnnnnnnnnnnnnnnnnnnnnnnnnnnnnnnnnnnnnnnnnnnnnnnnnnnnnnnnnnnnnnnnnnnnnnnnnnnnnnnnnnnnnnnnnnnnnnnnnnnnnnnnnnnnnnnnnnnnnnnnnnnnnnnnnnnnnnnnnnnnnnnnnnnnnnnnnnnnnnnnnnnnnnnnnnnnnnnnnnnnnnnnnnnnnnnnnnnnnnnnnnnnnnnnnnnnnnnnnnnnnnnnnnnnnnnnnnnnnnnnnnnnnnnnnnnnnnnnnnnnnnnnnnnnnnnnnnnnnnnnnnnnnnnnnnnnnnnnnnnnnnnnnnnnnnnnnnnnnnnnnnnnnnnnnnnnnnnnnnnnnnnnnnnnnnnnnnnnnnnnnnnnnnnnnnnnnnnnnnnnnnnnnnnnnnnnnnnnnnnnnnnnnnnnnnnnnnnnnnnnnnnnnnnnnnnnnnnnnnnnnnnnnnnnnnnnnnnnnnnnnnnnnnnnnnnnnnnnnnnnnnnnnnnnnnnnnnnnnnnnnnnnnnnnnnnnnnnnnnnnnnnnnnnnnnnnnnnnnnnnnnnnnnnnnnnnnnnnnnnnnnnnnnnnnnnnnnnnnnnnnnnnnnnnnnnnnnnnnnnnnnnnnnnnnnnnnnnnnnnnnnnnnnnnnnnnnnnnnnnnnnnnnnnnnnnnnnnnnnnnnnnnnnnnnnnnnnnnnnnnnnnnnnnnnnnnnnnnnnnnnnnnnnnnnnnnnnnnnnnnnnnnnnnnnnnnnnnnnnnnnnnnnnnnnnnnnnnnnnnnnnnnnnnnnnnnnnnnnnnnnnnnnnnnnnnnnnnnnnnnnnnnnnnnnnnnnnnnnnnnnnnnnnnnnnnnnnnnnnnnnnnnnnnnnnnnnnnnnnnnnnnnnnnnnnnnnnnnnnnnnnnnnnnnnnnnnnnnnnnnnnnnnnnnnnnnnnnnnnnnnnnnnnnnnnnnnnnnnnnnnnnnnnnnnnnnnnnnnnnnnnnnnnnnnnnnnnnnnnnnnnnnnnnnnnnnnnnnnnnnnnnnnnnnnnnnnnnnnnnnnnnnnnnnnnnnnnnnnnnnnnnnnnnnnnnnnnnnnnnnnnnnnnnnnnnnnnnnnnnnnnnnnnnnnnnnnnnnnnnnnnnnnnnnnnnnnnnnnnnnnnnnnnnnnnnnnnnnnnnnnnnnnnnnnnnnnnnnnnnnnnnnnnnnnnnnnnnnnnnnnnnnnnnnnnnnnnnnnnnnnnnnnnnnnnnnnnnnnnnnnnnnnnnnnnnnnnnnnnnnnnnnnnnnnnnnnnnnnnnnnnnnnnnnnnnnnnnnnnnnnnnnnnnnnnnnnnnnnnnnnnnnnnnnnnnnnnnnnnnnnnnnnnnnnnnnnnnnnnnnnnnnnnnnnnnnnnnnnnnnnnnnnnnnnnnnnnnnnnnnnnnnnnnnnnnnnnnnnnnnnnnnnnnnnnnnnnnnnnnnnnnnnnnnnnnnnnnnnnnnnnnnnnnnnnnnnnnnnnnnnnnnnnnnnnnnnnnnnnnnnnnnnnnnnnnnnnnnnnnnnnnnnnnnnnnnnnnnnnnnnnnnnnnnnnnnnnnnnnnnnnnnnnnnnnnnnnnnnnnnnnnnnnnnnnnnnnnnnnnnnnnnnnnnnnnnnnnnnnnnnnnnnnnnnnnnnnnnnnnnnnnnnnnnnnnnnnnnnnnnnnnnnnnnnnnnnnnnnnnnnnnnnnnnnnnnnnnnnnnnnnnnnnnnnnnnnnnnnnnnnnnnnnnnnnnnnnnnnnnnnnnnnnnnnnnnnnnnnnnnnnnnnnnnnnnnnnnnnnnnnnnnnnnnnnnnnnnnnnnnnnnnnnnnnnnnnnnnnnnnnnnnnnnnnnnnnnnnnnnnnnnnnnnnnnnnnnnnnnnnnnnnnnnnnnnnnnnnnnnnnnnnnnnnnnnnnnnnnnnnnnnnnnnnnnnnnnnnnnnnnnnnnnnnnnnnnnnnnnnnnnnnnnnnnnnnnnnnnnnnnnnnnnnnnnnnnnnnnnnnnnnnnnnnnnnnnnnnnnnnnnnnnnnnnnnnnnnnnnnnnnnnnnnnnnnnnnnnnnnnnnnnnnnnnnnnnnnnnnnnnnnnnnnnnnnnnnnnnnnnnnnnnnnnnnnnnnnnnnnnnnnnnnnnnnnnnnnnnnnnnnnnnnnnnnnnnnnnnnnnnnnnnnnnnnnnnnnnnnnnnnnnnnnnnnnnnnnnnnnnnnnnnnnnnnnnnnnnnnnnnnnnnnnnnnnnnnnnnnnnnnnnnnnnnnnnnnnnnnnnnnnnnnnnnnnnnnnnnnnnnnnnnnnnnnnnnnnnnnnnnnnnnnnnnnnnnnnnnnnnnnnnnnnnnnnnnnnnnnnnnnnnnnnnnnnnnnnnnnnnnnnnnnnnnnnnnnnnnnnnnnnnnnnnnnnnnnnnnnnnnnnnnnnnnnnnnnnnnnnnnnnnnnnnnnnnnnnnnnnnnnnnnnnnnnnnnnnnnnnnnnnnnnnnnnnnnnnnnnnnnnnnnnnnnnnnnnnnnnnnnnnnnnnnnnnnnnnnnnnnnnnnnnnnnnnnnnnnnnnnnnnnnnnnnnnnnnnnnnnnnnnnnnnnnnnnnnnnnnnnnnnnnnnnnnnnnnnnnnnnnnnnnnnnnnnnnnnnnnnnnnnnnnnnnnnnnnnnnnnnnnnnnnnnnnnnnnnnnnnnnnnnnnnnnnnnnnnnnnnnnnnnnnnnnnnnnnnnnnnnnnnnnnnnnnnnnnnnnnnnnnnnnnnnnnnnnnnnnnnnnnnnnnnnnnnnnnnnnnnnnnnnnnnnnnnnnnnnnnnnnnnnnnnnnnnnnnnnnnnnnnnnnnnnnnnnnnnnnnnnnnnnnnnnnnnnnnnnnnnnnnnnnnnnnnnnnnnnnnnnnnnnnnnnnnnnnnnnnnnnnnnnnnnnnnnnnnnnnnnnnnnnnnnnnnnnnnnnnnnnnnnnnnnnnnnnnnnnnnnnnnnnnnnnnnnnnnnnnnnnnnnnnnnnnnnnnnnnnnnnnnnnnnnnnnnnnnnnnnnnnnnnnnnnnnnnnnnnnnnnnnnnnnnnnnnnnnnnnnnnnnnnnnnnnnnnnnnnnnnnnnnnnnnnnnnnnnnnnnnnnnnnnnnnnnnnnnnnnnnnnnnnnnnnnnnnnnnnnnnnnnnnnnnnnnnnnnnnnnnnnnnnnnnnnnnnnnnnnnnnnnnnnnnnnnnnnnnnnnnnnnnnnnnnnnnnnnnnnnnnnnnnnnnnnnnnnnnnnnnnnnnnnnnnnnnnnnnnnnnnnnnnnnnnnnnnnnnnnnnnnnnnnnnnnnnnnnnnnnnnnnnnnnnnnnnnnnnnnnnnnnnnnnnnnnnnnnnnnnnnnnnnnnnnnnnnnnnnnnnnnnnnnnnnnnnnnnnnnnnnnnnnnnnnnnnnnnnnnnnnnnnnnnnnnnnnnnnnnnnnnnnnnnnnnnnnnnnnnnnnnnnnnnnnnnnnnnnnnnnnnnnnnnnnnnnnnnnnnnnnnnnnnnnnnnnnnnnnnnnnnnnnnnnnnnnnnnnnnnnnnnnnnnnnnnnnnnnnnnnnnnnnnnnnnnnnnnnnnnnnnnnnnnnnnnnnnnnnnnnnnnnnnnnnnnnnnnnnnnnnnnnnnnnnnnnnnnnnnnnnnnnnnnnnnnnnnnnnnnnnnnnnnnnnnnnnnnnnnnnnnnnnnnnnnnnnnnnnnnnnnnnnnnnnnnnnnnnnnnnnnnnnnnnnnnnnnnnnnnnnnnnnnnnnnnnnnnnnnnnnnnnnnnnnnnnnnnnnnnnnnnnnnnnnnnnnnnnnnnnnnnnnnnnnnnnnnnnnnnnnnnnnnnnnnnnnnnnnnnnnnnnnnnnnnnnnnnnnnnnnnnnnnnnnnnnnnnnnnnnnnnnnnnnnnnnnnnnnnnnnnnnnnnnnnnnnnnnnnnnnnnnnnnnnnnnnnnnnnnnnnnnnnnnnnnnnnnnnnnnnnnnnnnnnnnnnnnnnnnnnnnnnnnnnnnnnnnnnnnnnnnnnnnnnnnnnnnnnnnnnnnnnnnnnnnnnnnnnnnnnnnnnnnnnnnnnnnnnnnnnnnnnnnnnnnnnnnnnnnnnnnnnnnnnnnnnnnnnnnnnnnnnnnnnnnnnnnnnnnnnnnnnnnnnnnnnnnnnnnnnnnnnnnnnnnnnnnnnnnnnnnnnnnnnnnnnnnnnnnnnnnnnnnnnnnnnnnnnnnnnnnnnnnnnnnnnnnnnnnnnnnnnnnnnnnnnnnnnnnnnnnnnnnnnnnnnnnnnnnnnnnnnnnnnnnnnnnnnnnnnnnnnnnnnnnnnnnnnnnnnnnnnnnnnnnnnnnnnnnnnnnnnnnnnnnnnnnnnnnnnnnnnnnnnnnnnnnnnnnnnnnnnnnnnnnnnnnnnnnnnnnnnnnnnnnnnnnnnnnnnnnnnnnnnnnnnnnnnnnnnnnnnnnnnnnnnnnnnnnnnnnnnnnnnnnnnnnnnnnnnnnnnnnnnnnnnnnnnnnnnnnnnnnnnnnnnnnnnnnnnnnnnnnnnnnnnnnnnnnnnnnnnnnnnnnnnnnnnnnnnnnnnnnnnnnnnnnnnnnnnnnnnnnnnnnnnnnnnnnnnnnnnnnnnnnnnnnnnnnnnnnnnnnnnnnnnnnnnnnnnnnnnnnnnnnnnnnnnnnnnnnnnnnnnnnnnnnnnnnnnnnnnnnnnnnnnnnnnnnnnnnnnnnnnnnnnnnnnnnnnnnnnnnnnnnnnnnnnnnnnnnnnnnnnnnnnnnnnnnnnnnnnnnnnnnnnnnnnnnnnnnnnnnnnnnnnnnnnnnnnnnnnnnnnnnnnnnnnnnnnnnnnnnnnnnnnnnnnnnnnnnnnnnnnnnnnnnnnnnnnnnnnnnnnnnnnnnnnnnnnnnnnnnnnnnnnnnnnnnnnnnnnnnnnnnnnnnnnnnnnnnnnnnnnnnnnnnnnnnnnnnnnnnnnnnnnnnnnnnnnnnnnnnnnnnnnnnnnnnnnnnnnnnnnnnnnnnnnnnnnnnnnnnnnnnnnnnnnnnnnnnnnnnnnnnnnnnnnnnnnnnnnnnnnnnnnnnnnnnnnnnnnnnnnnnnnnnnnnnnnnnnnnnnnnnnnnnnnnnnnnnnnnnnnnnnnnnnnnnnnnnnnnnnnnnnnnnnnnnnnnnnnnnnnnnnnnnnnnnnnnnnnnnnnnnnnnnnnnnnnnnnnnnnnnnnnnnnnnnnnnnnnnnnnnnnnnnnnnnnnnnnnnnnnnnnnnnnnnnnnnnnnnnnnnnnnnnnnnnnnnnnnnnnnnnnnnnnnnnnnnnnnnnnnnnnnnnnnnnnnnnnnnnnnnnnnnnnnnnnnnnnnnnnnnnnnnnnnnnnnnnnnnnnnnnnnnnnnnnnnnnnnnnnnnnnnnnnnnnnnnnnnnnnnnnnnnnnnnnnnnnnnnnnnnnnnnnnnnnnnnnnnnnnnnnnnnnnnnnnnnnnnnnnnnnnnnnnnnnnnnnnnnnnnnnnnnnnnnnnnnnnnnnnnnnnnnnnnnnnnnnnnnnnnnnnnnnnnnnnnnnnnnnnnnnnnnnnnnnnnnnnnnnnnnnnnnnnnnnnnnnnnnnnnnnnnnnnnnnnnnnnnnnnnnnnnnnnnnnnnnnnnnnnnnnnnnnnnnnnnnnnnnnnnnnnnnnnnnnnnnnnnnnnnnnnnnnnnnnnnnnnnnnnnnnnnnnnnnnnnnnnnnnnnnnnnnnnnnnnnnnnnnnnnnnnnnnnnnnnnnnnnnnnnnnnnnnnnnnnnnnnnnnnnnnnnnnnnnnnnnnnnnnnnnnnnnnnnnnnnnnnnnnnnnnnnnnnnnnnnnnnnnnnnnnnnnnnnnnnnnnnnnnnnnnnnnnnnnnnnnnnnnnnnnnnnnnnnnnnnnnnnnnnnnnnnnnnnnnnnnnnnnnnnnnnnnnnnnnnnnnnnnnnnnnnnnnnnnnnnnnnnnnnnnnnnnnnnnnnnnnnnnnnnnnnnnnnnnnnnnnnnnnnnnnnnnnnnnnnnnnnnnnnnnnnnnnnnnnnnnnnnnnnnnnnnnnnnnnnnnnnnnnnnnnnnnnnnnnnnnnnnnnnnnnnnnnnnnnnnnnnnnnnnnnnnnnnnnnnnnnnnnnnnnnnnnnnnnnnnnnnnnnnnnnnnnnnnnnnnnnnnnnnnnnnnnnnnnnnnnnnnnnnnnnnnnnnnnnnnnnnnnnnnnnnnnnnnnnnnnnnnnnnnnnnnnnnnnnnnnnnnnnnnnnnnnnnnnnnnnnnnnnnnnnnnnnnnnnnnnnnnnnnnnnnnnnnnnnnnnnnnnnnnnnnnnnnnnnnnnnnnnnnnnnnnnnnnnnnnnnnnnnnnnnnnnnnnnnnnnnnnnnnnnnnnnnnnnnnnnnnnnnnnnnnnnnnnnnnnnnnnnnnnnnnnnnnnnnnnnnnnnnnnnnnnnnnnnnnnnnnnnnnnnnnnnnnnnnnnnnnnnnnnnnnnnnnnnnnnnnnnnnnnnnnnnnnnnnnnnnnnnnnnnnnnnnnnnnnnnnnnnnnnnnnnnnnnnnnnnnnnnnnnnnnnnnnnnnnnnnnnnnnnnnnnnnnnnnnnnnnnnnnnnnnnnnnnnnnnnnnnnnnnnnnnnnnnnnnnnnnnnnnnnnnnnnnnnnnnnnnnnnnnnnnnnnnnnnnnnnnnnnnnnnnnnnnnnnnnnnnnnnnnnnnnnnnnnnnnnnnnnnnnnnnnnnnnnnnnnnnnnnnnnnnnnnnnnnnnnnnnnnnnnnnnnnnnnnnnnnnnnnnnnnnnnnnnnnnnnnnnnnnnnnnnnnnnnnnnnnnnnnnnnnnnnnnnnnnnnnnnnnnnnnnnnnnnnnnnnnnnnnnnnnnnnnnnnnnnnnnnnnnnnnnnnnnnnnnnnnnnnnnnnnnnnnnnnnnnnnnnnnnnnnnnnnnnnnnnnnnnnnnnnnnnnnnnnnnnnnnnnnnnnnnnnnnnnnnnnnnnnnnnnnnnnnnnnnnnnnnnnnnnnnnnnnnnnnnnnnnnnnnnnnnnnnnnnnnnnnnnnnnnnnnnnnnnnnnnnnnnnnnnnnnnnnnnnnnnnnnnnnnnnnnnnnnnnnnnnnnnnnnnnnnnnnnnnnnnnnnnnnnnnnnnnnnnnnnnnnnnnnnnnnnnnnnnnnnnnnnnnnnnnnnnnnnnnnnnnnnnnnnnnnnnnnnnnnnnnnnnnnnnnnnnnnnnnnnnnnnnnnnnnnnnnnnnnnnnnnnnnnnnnnnnnnnnnnnnnnnnnnnnnnnnnnnnnnnnnnnnnnnnnnnnnnnnnnnnnnnnnnnnnnnnnnnnnnnnnnnnnnnnnnnnnnnnnnnnnnnnnnnnnnnnnnnnnnnnnnnnnnnnnnnnnnnnnnnnnnnnnnnnnnnnnnnnnnnnnnnnnnnnnnnnnnnnnnnnnnnnnnnnnnnnnnnnnnnnnnnnnnnnnnnnnnnnnnnnnnnnnnnnnnnnnnnnnnnnnnnnnnnnnnnnnnnnnnnnnnnnnnnnnnnnnnnnnnnnnnnnnnnnnnnnnnnnnnnnnnnnnnnnnnnnnnnnnnnnnnnnnnnnnnnnnnnnnnnnnnnnnnnnnnnnnnnnnnnnnnnnnnnnnnnnnnnnnnnnnnnnnnnnnnnnnnnnnnnnnnnnnnnnnnnnnnnnnnnnnnnnnnnnnnnnnnnnnnnnnnnnnnnnnnnnnnnnnnnnnnnnnnnnnnnnnnnnnnnnnnnnnnnnnnnnnnnnnnnnnnnnnnnnnnnnnnnnnnnnnnnnnnnnnnnnnnnnnnnnnnnnnnnnnnnnnnnnnnnnnnnnnnnnnnnnnnnnnnnnnnnnnnnnnnnnnnnnnnnnnnnnnnnnnnnnnnnnnnnnnnnnnnnnnnnnnnnnnnnnnnnnnnnnnnnnnnnnnnnnnnnnnnnnnnnnnnnnnnnnnnnnnnnnnnnnnnnnnnnnnnnnnnnnnnnnnnnnnnnnnnnnnnnnnnnnnnnnnnnnnnnnnnnnnnnnnnnnnnnnnnnnnnnnnnnnnnnnnnnnnnnnnnnnnnnnnnnnnnnnnnnnnnnnnnnnnnnnnnnnnnnnnnnnnnnnnnnnnnnnnnnnnnnnnnnnnnnnnnnnnnnnnnnnnnnnnnnnnnnnnnnnnnnnnnnnnnnnnnnnnnnnnnnnnnnnnnnnnnnnnnnnnnnnnnnnnnnnnnnnnnnnnnnnnnnnnnnnnnnnnnnnnnnnnnnnnnnnnnnnnnnnnnnnnnnnnnnnnnnnnnnnnnnnnnnnnnnnnnnnnnnnnnnnnnnnnnnnnnnnnnnnnnnnnnnnnnnnnnnnnnnnnnnnnnnnnnnnnnnnnnnnnnnnnnnnnnnnnnnnnnnnnnnnnnnnnnnnnnnnnnnnnnnnnnnnnnnnnnnnnnnnnnnnnnnnnnnnnnnnnnnnnnnnnnnnnnnnnnnnnnnnnnnnnnnnnnnnnnnnnnnnnnnnnnnnnnnnnnnnnnnnnnnnnnnnnnnnnnnnnnnnnnnnnnnnnnnnnnnnnnnnnnnnnnnnnnnnnnnnnnnnnnnnnnnnnnnnnnnnnnnnnnnnnnnnnnnnnnnnnnnnnnnnnnnnnnnnnnnnnnnnnnnnnnnnnnnnnnnnnnnnnnnnnnnnnnnnnnnnnnnnnnnnnnnnnnnnnnnnnnnnnnnnnnnnnnnnnnnnnnnnnnnnnnnnnnnnnnnnnnnnnnnnnnnnnnnnnnnnnnnnnnnnnnnnnnnnnnnnnnnnnnnnnnnnnnnnnnnnnnnnnnnnnnnnnnnnnnnnnnnnnnnnnnnnnnnnnnnnnnnnnnnnnnnnnnnnnnnnnnnnnnnnnnnnnnnnnnnnnnnnnnnnnnnnnnnnnnnnnnnnnnnnnnnnnnnnnnnnnnnnnnnnnnnnnnnnnnnnnnnnnnnnnnnnnnnnnnnnnnnnnnnnnnnnnnnnnnnnnnnnnnnnnnnnnnnnnnnnnnnnnnnnnnnnnnnnnnnnnnnnnnnnnnnnnnnnnnnnnnnnnnnnnnnnnnnnnnnnnnnnnnnnnnnnnnnnnnnnnnnnnnnnnnnnnnnnnnnnnnnnnnnnnnnnnnnnnnnnnnnnnnnnnnnnnnnnnnnnnnnnnnnnnnnnnnnnnnnnnnnnnnnnnnnnnnnnnnnnnnnnnnnnnnnnnnnnnnnnnnnnnnnnnnnnnnnnnnnnnnnnnnnnnnnnnnnnnnnnnnnnnnnnnnnnnnnnnnnnnnnnnnnnnnnnnnnnnnnnnnnnnnnnnnnnnnnnnnnnnnnnnnnnnnnnnnnnnnnnnnnnnnnnnnnnnnnnnnnnnnnnnnnnnnnnnnnnnnnnnnnnnnnnnnnnnnnnnnnnnnnnnnnnnnnnnnnnnnnnnnnnnnnnnnnnnnnnnnnnnnnnnnnnnnnnnnnnnnnnnnnnnnnnnnnnnnnnnnnnnnnnnnnnnnnnnnnnnnnnnnnnnnnnnnnnnnnnnnnnnnnnnnnnnnnnnnnnnnnnnnnnnnnnnnnnnnnnnnnnnnnnnnnnnnnnnnnnnnnnnnnnnnnnnnnnnnnnnnnnnnnnnnnnnnnnnnnnnnnnnnnnnnnnnnnnnnnnnnnnnnnnnnnnnnnnnnnnnnnnnnnnnnnnnnnnnnnnnnnnnnnnnnnnnnnnnnnnnnnnnnnnnnnnnnnnnnnnnnnnnnnnnnnnnnnnnnnnnnnnnnnnnnnnnnnnnnnnnnnnnnnnnnnnnnnnnnnnnnnnnnnnnnnnnnnnnnnnnnnnnnnnnnnnnnnnnnnnnnnnnnnnnnnnnnnnnnnnnnnnnnnnnnnnnnnnnnnnnnnnnnnnnnnnnnnnnnnnnnnnnnnnnnnnnnnnnnnnnnnnnnnnnnnnnnnnnnnnnnnnnnnnnnnnnnnnnnnnnnnnnnnnnnnnnnnnnnnnnnnnnnnnnnnnnnnnnnnnnnnnnnnnnnnnnnnnnnnnnnnnnnnnnnnnnnnnnnnnnnnnnnnnnnnnnnnnnnnnnnnnnnnnnnnnnnnnnnnnnnnnnnnnnnnnnnnnnnnnnnnnnnnnnnnnnnnnnnnnnnnnnnnnnnnnnnnnnnnnnnnnnnnnnnnnnnnnnnnnnnnnnnnnnnnnnnnnnnnnnnnnnnnnnnnnnnnnnnnnnnnnnnnnnnnnnnnnnnnnnnnnnnnnnnnnnnnnnnnnnnnnnnnnnnnnnnnnnnnnnnnnnnnnnnnnnnnnnnnnnnnnnnnnnnnnnnnnnnnnnnnnnnnnnnnnnnnnnnnnnnnnnnnnnnnnnnnnnnnnnnnnnnnnnnnnnnnnnnnnnnnnnnnnnnnnnnnnnnnnnnnnnnnnnnnnnnnnnnnnnnnnnnnnnnnnnnnnnnnnnnnnnnnnnnnnnnnnnnnnnnnnnnnnnnnnnnnnnnnnnnnnnnnnnnnnnnnnnnnnnnnnnnnnnnnnnnnnnnnnnnnnnnnnnnnnnnnnnnnnnnnnnnnnnnnnnnnnnnnnnnnnnnnnnnnnnnnnnnnnnnnnnnnnnnnnnnnnnnnnnnnnnnnnnnnnnnnnnnnnnnnnnnnnnnnnnnnnnnnnnnnnnnnnnnnnnnnnnnnnnnnnnnnnnnnnnnnnnnnnnnnnnnnnnnnnnnnnnnnnnnnnnnnnnnnnnnnnnnnnnnnnnnnnnnnnnnnnnnnnnnnnnnnnnnnnnnnnnnnnnnnnnnnnnnnnnnnnnnnnnnnnnnnnnnnnnnnnnnnnnnnnnnnnnnnnnnnnnnnnnnnnnnnnnnnnnnnnnnnnnnnnnnnnnnnnnnnnnnnnnnnnnnnnnnnnnnnnnnnnnnnnnnnnnnnnnnnnnnnnnnnnnnnnnnnnnnnnnnnnnnnnnnnnnnnnnnnnnnnnnnnnnnnnnnnnnnnnnnnnnnnnnnnnnnnnnnnnnnnnnnnnnnnnnnnnnnnnnnnnnnnnnnnnnnnnnnnnnnnnnnnnnnnnnnnnnnnnnnnnnnnnnnnnnnnnnnnnnnnnnnnnnnnnnnnnnnnnnnnnnnnnnnnnnnnnnnnnnnnnnnnnnnnnnnnnnnnnnnnnnnnnnnnnnnnnnnnnnnnnnnnnnnnnnnnnnnnnnnnnnnnnnnnnnnnnnnnnnnnnnnnnnnnnnnnnnnnnnnnnnnnnnnnnnnnnnnnnnnnnnnnnnnnnnnnnnnnnnnnnnnnnnnnnnnnnnnnnnnnnnnnnnnnnnnnnnnnnnnnnnnnnnnnnnnnnnnnnnnnnnnnnnnnnnnnnnnnnnnnnnnnnnnnnnnnnnnnnnnnnnnnnnnnnnnnnnnnnnnnnnnnnnnnnnnnnnnnnnnnnnnnnnnnnnnnnnnnnnnnnnnnnnnnnnnnnnnnnnnnnnnnnnnnnnnnnnnnnnnnnnnnnnnnnnnnnnnnnnnnnnnnnnnnnnnnnnnnnnnnnnnnnnnnnnnnnnnnnnnnnnnnnnnnnnnnnnnnnnnnnnnnnnnnnnnnnnnnnnnnnnnnnnnnnnnnnnnnnnnnnnnnnnnnnnnnnnnnnnnnnnnnnnnnnnnnnnnnnnnnnnnnnnnnnnnnnnnnnnnnnnnnnnnnnnnnnnnnnnnnnnnnnnnnnnnnnnnnnnnnnnnnnnnnnnnnnnnnnnnnnnnnnnnnnnnnnnnnnnnnnnnnnnnnnnnnnnnnnnnnnnnnnnnnnnnnnnnnnnnnnnnnnnnnnnnnnnnnnnnnnnnnnnnnnnnnnnnnnnnnnnnnnnnnnnnnnnnnnnnnnnnnnnnnnnnnnnnnnnnnnnnnnnnnnnnnnnnnnnnnnnnnnnnnnnnnnnnnnnnnnnnnnnnnnnnnnnnnnnnnnnnnnnnnnnnnnnnnnnnnnnnnnnnnnnnnnnnnnnnnnnnnnnnnnnnnnnnnnnnnnnnnnnnnnnnnnnnnnnnnnnnnnnnnnnnnnnnnnnnnnnnnnnnnnnnnnnnnnnnnnnnnnnnnnnnnnnnnnnnnnnnnnnnnnnnnnnnnnnnnnnnnnnnnnnnnnnnnnnnnnnnnnnnnnnnnnnnnnnnnnnnnnnnnnnnnnnnnnnnnnnnnnnnnnnnnnnnnnnnnnnnnnnnnnnnnnnnnnnnnnnnnnnnnnnnnnnnnnnnnnnnnnnnnnnnnnnnnnnnnnnnnnnnnnnnnnnnnnnnnnnnnnnnnnnnnnnnnnnnnnnnnnnnnnnnnnnnnnnnnnnnnnnnnnnnnnnnnnnnnnnnnnnnnnnnnnnnnnnnnnnnnnnnnnnnnnnnnnnnnnnnnnnnnnnnnnnnnnnnnnnnnnnnnnnnnnnnnnnnnnnnnnnnnnnnnnnnnnnnnnnnnnnnnnnnnnnnnnnnnnnnnnnnnnnnnnnnnnnnnnnnnnnnnnnnnnnnnnnnnnnnnnnnnnnnnnnnnnnnnnnnnnnnnnnnnnnnnnnnnnnnnnnnnnnnnnnnnnnnnnnnnnnnnnnnnnnnnnnnnnnnnnnnnnnnnnnnnnnnnnnnnnnnnnnnnnnnnnnnnnnnnnnnnnnnnnnnnnnnnnnnnnnnnnnnnnnnnnnnnnnnnnnnnnnnnnnnnnnnnnnnnnnnnnnnnnnnnnnnnnnnnnnnnnnnnnnnnnnnnnnnnnnnnnnnnnnnnnnnnnnnnnnnnnnnnnnnnnnnnnnnnnnnnnnnnnnnnnnnnnnnnnnnnnnnnnnnnnnnnnnnnnnnnnnnnnnnnnnnnnnnnnnnnnnnnnnnnnnnnnnnnnnnnnnnnnnnnnnnnnnnnnnnnnnnnnnnnnnnnnnnnnnnnnnnnnnnnnnnnnnnnnnnnnnnnnnnnnnnnnnnnnnnnnnnnnnnnnnnnnnnnnnnnnnnnnnnnnnnnnnnnnnnnnnnnnnnnnnnnnnnnnnnnnnnnnnnnnnnnnnnnnnnnnnnnnnnnnnnnnnnnnnnnnnnnnnnnnnnnnnnnnnnnnnnnnnnnnnnnnnnnnnnnnnnnnnnnnnnnnnnnnnnnnnnnnnnnnnnnnnnnnnnnnnnnnnnnnnnnnnnnnnnnnnnnnnnnnnnnnnnnnnnnnnnnnnnnnnnnnnnnnnnnnnnnnnnnnnnnnnnnnnnnnnnnnnnnnnnnnnnnnnnnnnnnnnnnnnnnnnnnnnnnnnnnnnnnnnnnnnnnnnnnnnnnnnnnnnnnnnnnnnnnnnnnnnnnnnnnnnnnnnnnnnnnnnnnnnnnnnnnnnnnnnnnnnnnnnnnnnnnnnnnnnnnnnnnnnnnnnnnnnnnnnnnnnnnnnnnnnnnnnnnnnnnnnnnnnnnnnnnnnnnnnnnnnnnnnnnnnnnnnnnnnnnnnnnnnnnnnnnnnnnnnnnnnnnnnnnnnnnnnnnnnnnnnnnnnnnnnnnnnnnnnnnnnnnnnnnnnnnnnnnnnnnnnnnnnnnnnnnnnnnnnnnnnnnnnnnnnnnnnnnnnnnnnnnnnnnnnnnnnnnnnnnnnnnnnnnnnnnnnnnnnnnnnnnnnnnnnnnnnnnnnnnnnnnnnnnnnnnnnnnnnnnnnnnnnnnnnnnnnnnnnnnnnnnnnnnnnnnnnnnnnnnnnnnnnnnnnnnnnnnnnnnnnnnnnnnnnnnnnnnnnnnnnnnnnnnnnnnnnnnnnnnnnnnnnnnnnnnnnnnnnnnnnnnnnnnnnnnnnnnnnnnnnnnnnnnnnnnnnnnnnnnnnnnnnnnnnnnnnnnnnnnnnnnnnnnnnnnnnnnnnnnnnnnnnnnnnnnnnnnnnnnnnnnnnnnnnnnnnnnnnnnnnnnnnnnnnnnnnnnnnnnnnnnnnnnnnnnnnnnnnnnnnnnnnnnnnnnnnnnnnnnnnnnnnnnnnnnnnnnnnnnnnnnnnnnnnnnnnnnnnnnnnnnnnnnnnnnnnnnnnnnnnnnnnnnnnnnnnnnnnnnnnnnnnnnnnnnnnnnnnnnnnnnnnnnnnnnnnnnnnnnnnnnnnnnnnnnnnnnnnnnnnnnnnnnnnnnnnnnnnnnnnnnnnnnnnnnnnnnnnnnnnnnnnnnnnnnnnnnnnnnnnnnnnnnnnnnnnnnnnnnnnnnnnnnnnnnnnnnnnnnnnnnnnnnnnnnnnnnnnnnnnnnnnnnnnnnnnnnnnnnnnnnnnnnnnnnnnnnnnnnnnnnnnnnnnnnnnnnnnnnnnnnnnnnnnnnnnnnnnnnnnnnnnnnnnnnnnnnnnnnnnnnnnnnnnnnnnnnnnnnnnnnnnnnnnnnnnnnnnnnnnnnnnnnnnnnnnnnnnnnnnnnnnnnnnnnnnnnnnnnnnnnnnnnnnnnnnnnnnnnnnnnnnnnnnnnnnnnnnnnnnnnnnnnnnnnnnnnnnnnnnnnnnnnnnnnnnnnnnnnnnnnnnnnnnnnnnnnnnnnnnnnnnnnnnnnnnnnnnnnnnnnnnnnnnnnnnnnnnnnnnnnnnnnnnnnnnnnnnnnnnnnnnnnnnnnnnnnnnnnnnnnnnnnnnnnnnnnnnnnnnnnnnnnnnnnnnnnnnnnnnnnnnnnnnnnnnnnnnnnnnnnnnnnnnnnnnnnnnnnnnnnnnnnnnnnnnnnnnnnnnnnnnnnnnnnnnnnnnnnnnnnnnnnnnnnnnnnnnnnnnnnnnnnnnnnnnnnnnnnnnnnnnnnnnnnnnnnnnnnnnnnnnnnnnnnnnnnnnnnnnnnnnnnnnnnnnnnnnnnnnnnnnnnnnnnnnnnnnnnnnnnnnnnnnnnnnnnnnnnnnnnnnnnnnnnnnnnnnnnnnnnnnnnnnnnnnnnnnnnnnnnnnnnnnnnnnnnnnnnnnnnnnnnnnnnnnnnnnnnnnnnnnnnnnnnnnnnnnnnnnnnnnnnnnnnnnnnnnnnnnnnnnnnnnnnnnnnnnnnnnnnnnnnnnnnnnnnnnnnnnnnnnnnnnnnnnnnnnnnnnnnnnnnnnnnnnnnnnnnnnnnnnnnnnnnnnnnnnnnnnnnnnnnnnnnnnnnnnnnnnnnnnnnnnnnnnnnnnnnnnnnnnnnnnnnnnnnnnnnnnnnnnnnnnnnnnnnnnnnnnnnnnnnnnnnnnnnnnnnnnnnnnnnnnnnnnnnnnnnnnnnnnnnnnnnnnnnnnnnnnnnnnnnnnnnnnnnnnnnnnnnnnnnnnnnnnnnnnnnnnnnnnnnnnnnnnnnnnnnnnnnnnnnnnnnnnnnnnnnnnnnnnnnnnnnnnnnnnnnnnnnnnnnnnnnnnnnnnnnnnnnnnnnnnnnnnnnnnnnnnnnnnnnnnnnnnnnnnnnnnnnnnnnnnnnnnnnnnnnnnnnnnnnnnnnnnnnnnnnnnnnnnnnnnnnnnnnnnnnnnnnnnnnnnnnnnnnnnnnnnnnnnnnnnnnnnnnnnnnnnnnnnnnnnnnnnnnnnnnnnnnnnnnnnnnnnnnnnnnnnnnnnnnnnnnnnnnnnnnnnnnnnnnnnnnnnnnnnnnnnnnnnnnnnnnnnnnnnnnnnnnnnnnnnnnnnnnnnnnnnnnnnnnnnnnnnnnnnnnnnnnnnnnnnnnnnnnnnnnnnnnnnnnnnnnnnnnnnnnnnnnnnnnnnnnnnnnnnnnnnnnnnnnnnnnnnnnnnnnnnnnnnnnnnnnnnnnnnnnnnnnnnnnnnnnnnnnnnnnnnnnnnnnnnnnnnnnnnnnnnnnnnnnnnnnnnnnnnnnnnnnnnnnnnnnnnnnnnnnnnnnnnnnnnnnnnnnnnnnnnnnnnnnnnnnnnnnnnnnnnnnnnnnnnnnnnnnnnnnnnnnnnnnnnnnnnnnnnnnnnnnnnnnnnnnnnnnnnnnnnnnnnnnnnnnnnnnnnnnnnnnnnnnnnnnnnnnnnnnnnnnnnnnnnnnnnnnnnnnnnnnnnnnnnnnnnnnnnnnnnnnnnnnnnnnnnnnnnnnnnnnnnnnnnnnnnnnnnnnnnnnnnnnnnnnnnnnnnnnnnnnnnnnnnnnnnnnnnnnnnnnnnnnnnnnnnnnnnnnnnnnnnnnnnnnnnnnnnnnnnnnnnnnnnnnnnnnnnnnnnnnnnnnnnnnnnnnnnnnnnnnnnnnnnnnnnnnnnnnnnnnnnnnnnnnnnnnnnnnnnnnnnnnnnnnnnnnnnnnnnnnnnnnnnnnnnnnnnnnnnnnnnnnnnnnnnnnnnnnnnnnnnnnnnnnnnnnnnnnnnnnnnnnnnnnnnnnnnnnnnnnnnnnnnnnnnnnnnnnnnnnnnnnnnnnnnnnnnnnnnnnnnnnnnnnnnnnnnnnnnnnnnnnnnnnnnnnnnnnnnnnnnnnnnnnnnnnnnnnnnnnnnnnnnnnnnnnnnnnnnnnnnnnnnnnnnnnnnnnnnnnnnnnnnnnnnnnnnnnnnnnnnnnnnnnnnnnnnnnnnnnnnnnnnnnnnnnnnnnnnnnnnnnnnnnnnnnnnnnnnnnnnnnnnnnnnnnnnnnnnnnnnnnnnnnnnnnnnnnnnnnnnnnnnnnnnnnnnnnnnnnnnnnnnnnnnnnnnnnnnnnnnnnnnnnnnnnnnnnnnnnnnnnnnnnnnnnnnnnnnnnnnnnnnnnnnnnnnnnnnnnnnnnnnnnnnnnnnnnnnnnnnnnnnnnnnnnnnnnnnnnnnnnnnnnnnnnnnnnnnnnnnnnnnnnnnnnnnnnnnnnnnnnnnnnnnnnnnnnnnnnnnnnnnnnnnnnnnnnnnnnnnnnnnnnnnnnnnnnnnnnnnnnnnnnnnnnnnnnnnnnnnnnnnnnnnnnnnnnnnnnnnnnnnnnnnnnnnnnnnnnnnnnnnnnnnnnnnnnnnnnnnnnnnnnnnnnnnnnnnnnnnnnnnnnnnnnnnnnnnnnnnnnnnnnnnnnnnnnnnnnnnnnnnnnnnnnnnnnnnnnnnnnnnnnnnnnnnnnnnnnnnnnnnnnnnnnnnnnnnnnnnnnnnnnnnnnnnnnnnnnnnnnnnnnnnnnnnnnnnnnnnnnnnnnnnnnnnnnnnnnnnnnnnnnnnnnnnnnnnnnnnnnnnnnnnnnnnnnnnnnnnnnnnnnnnnnnnnnnnnnnnnnnnnnnnnnnnnnnnnnnnnnnnnnnnnnnnnnnnnnnnnnnnnnnnnnnnnnnnnnnnnnnnnnnnnnnnnnnnnnnnnnnnnnnnnnnnnnnnnnnnnnnnnnnnnnnnnnnnnnnnnnnnnnnnnnnnnnnnnnnnnnnnnnnnnnnnnnnnnnnnnnnnnnnnnnnnnnnnnnnnnnnnnnnnnnnnnnnnnnnnnnnnnnnnnnnnnnnnnnnnnnnnnnnnnnnnnnnnnnnnnnnnnnnnnnnnnnnnnnnnnnnnnnnnnnnnnnnnnnnnnnnnnnnnnnnnnnnnnnnnnnnnnnnnnnnnnnnnnnnnnnnnnnnnnnnnnnnnnnnnnnnnnnnnnnnnnnnnnnnnnnnnnnnnnnnnnnnnnnnnnnnnnnnnnnnnnnnnnnnnnnnnnnnnnnnnnnnnnnnnnnnnnnnnnnnnnnnnnnnnnnnnnnnnnnnnnnnnnnnnnnnnnnnnnnnnnnnnnnnnnnnnnnnnnnnnnnnnnnnnnnnnnnnnnnnnnnnnnnnnnnnnnnnnnnnnnnnnnnnnnnnnnnnnnnnnnnnnnnnnnnnnnnnnnnnnnnnnnnnnnnnnnnnnnnnnnnnnnnnnnnnnnnnnnnnnnnnnnnnnnnnnnnnnnnnnnnnnnnnnnnnnnnnnnnnnnnnnnnnnnnnnnnnnnnnnnnnnnnnnnnnnnnnnnnnnnnnnnnnnnnnnnnnnnnnnnnnnnnnnnnnnnnnnnnnnnnnnnnnnnnnnnnnnnnnnnnnnnnnnnnnnnnnnnnnnnnnnnnnnnnnnnnnnnnnnnnnnnnnnnnnnnnnnnnnnnnnnnnnnnnnnnnnnnnnnnnnnnnnnnnnnnnnnnnnnnnnnnnnnnnnnnnnnnnnnnnnnnnnnnnnnnnnnnnnnnnnnnnnnnnnnnnnnnnnnnnnnnnnnnnnnnnnnnnnnnnnnnnnnnnnnnnnnnnnnnnnnnnnnnnnnnnnnnnnnnnnnnnnnnnnnnnnnnnnnnnnnnnnnnnnnnnnnnnnnnnnnnnnnnnnnnnnnnnnnnnnnnnnnnnnnnnnnnnnnnnnnnnnnnnnnnnnnnnnnnnnnnnnnnnnnnnnnnnnnnnnnnnnnnnnnnnnnnnnnnnnnnnnnnnnnnnnnnnnnnnnnnnnnnnnnnnnnnnnnnnnnnnnnnnnnnnnnnnnnnnnnnnnnnnnnnnnnnnnnnnnnnnnnnnnnnnnnnnnnnnnnnnnnnnnnnnnnnnnnnnnnnnnnnnnnnnnnnnnnnnnnnnnnnnnnnnnnnnnnnnnnnnnnnnnnnnnnnnnnnnnnnnnnnnnnnnnnnnnnnnnnnnnnnnnnnnnnnnnnnnnnnnnnnnnnnnnnnnnnnnnnnnnnnnnnnnnnnnnnnnnnnnnnnnnnnnnnnnnnnnnnnnnnnnnnnnnnnnnnnnnnnnnnnnnnnnnnnnnnnnnnnnnnnnnnnnnnnnnnnnnnnnnnnnnnnnnnnnnnnnnnnnnnnnnnnnnnnnnnnnnnnnnnnnnnnnnnnnnnnnnnnnnnnnnnnnnnnnnnnnnnnnnnnnnnnnnnnnnnnnnnnnnnnnnnnnnnnnnnnnnnnnnnnnnnnnnnnnnnnnnnnnnnnnnnnnnnnnnnnnnnnnnnnnnnnnnnnnnnnnnnnnnnnnnnnnnnnnnnnnnnnnnnnnnnnnnnnnnnnnnnnnnnnnnnnnnnnnnnnnnnnnnnnnnnnnnnnnnnnnnnnnnnnnnnnnnnnnnnnnnnnnnnnnnnnnnnnnnnnnnnnnnnnnnnnnnnnnnnnnnnnnnnnnnnnnnnnnnnnnnnnnnnnnnnnnnnnnnnnnnnnnnnnnnnnnnnnnnnnnnnnnnnnnnnnnnnnnnnnnnnnnnnnnnnnnnnnnnnnnnnnnnnnnnnnnnnnnnnnnnnnnnnnnnnnnnnnnnnnnnnnnnnnnnnnnnnnnnnnnnnnnnnnnnnnnnnnnnnnnnnnnnnnnnnnnnnnnnnnnnnnnnnnnnnnnnnnnnnnnnnnnnnnnnnnnnnnnnnnnnnnnnnnnnnnnnnnnnnnnnnnnnnnnnnnnnnnnnnnnnnnnnnnnnnnnnnnnnnnnnnnnnnnnnnnnnnnnnnnnnnnnnnnnnnnnnnnnnnnnnnnnnnnnnnnnnnnnnnnnnnnnnnnnnnnnnnnnnnnnnnnnnnnnnnnnnnnnnnnnnnnnnnnnnnnnnnnnnnnnnnnnnnnnnnnnnnnnnnnnnnnnnnnnnnnnnnnnnnnnnnnnnnnnnnnnnnnnnnnnnnnnnnnnnnnnnnnnnnnnnnnnnnnnnnnnnnnnnnnnnnnnnnnnnnnnnnnnnnnnnnnnnnnnnnnnnnnnnnnnnnnnnnnnnnnnnnnnnnnnnnnnnnnnnnnnnnnnnnnnnnnnnnnnnnnnnnnnnnnnnnnnnnnnnnnnnnnnnnnnnnnnnnnnnnnnnnnnnnnnnnnnnnnnnnnnnnnnnnnnnnnnnnnnnnnnnnnnnnnnnnnnnnnnnnnnnnnnnnnnnnnnnnnnnnnnnnnnnnnnnnnnnnnnnnnnnnnnnnnnnnnnnnnnnnnnnnnnnnnnnnnnnnnnnnnnnnnnnnnnnnnnnnnnnnnnnnnnnnnnnnnnnnnnnnnnnnnnnnnnnnnnnnnnnnnnnnnnnnnnnnnnnnnnnnnnnnnnnnnnnnnnnnnnnnnnnnnnnnnnnnnnnnnnnnnnnnnnnnnnnnnnnnnnnnnnnnnnnnnnnnnnnnnnnnnnnnnnnnnnnnnnnnnnnnnnnnnnnnnnnnnnnnnnnnnnnnnnnnnnnnnnnnnnnnnnnnnnnnnnnnnnnnnnnnnnnnnnnnnnnnnnnnnnnnnnnnnnnnnnnnnnnnnnnnnnnnnnnnnnnnnnnnnnnnnnnnnnnnnnnnnnnnnnnnnnnnnnnnnnnnnnnnnnnnnnnnnnnnnnnnnnnnnnnnnnnnnnnnnnnnnnnnnnnnnnnnnnnnnnnnnnnnnnnnnnnnnnnnnnnnnnnnnnnnnnnnnnnnnnnnnnnnnnnnnnnnnnnnnnnnnnnnnnnnnnnnnnnnnnnnnnnnnnnnnnnnnnnnnnnnnnnnnnnnnnnnnnnnnnnnnnnnnnnnnnnnnnnnnnnnnnnnnnnnnnnnnnnnnnnnnnnnnnnnnnnnnnnnnnnnnnnnnnnnnnnnnnnnnnnnnnnnnnnnnnnnnnnnnnnnnnnnnnnnnnnnnnnnnnnnnnnnnnnnnnnnnnnnnnnnnnnnnnnnnnnnnnnnnnnnnnnnnnnnnnnnnnnnnnnnnnnnnnnnnnnnnnnnnnnnnnnnnnnnnnnnnnnnnnnnnnnnnnnnnnnnnnnnnnnnnnnnnnnnnnnnnnnnnnnnnnnnnnnnnnnnnnnnnnnnnnnnnnnnnnnnnnnnnnnnnnnnnnnnnnnnnnnnnnnnnnnnnnnnnnnnnnnnnnnnnnnnnnnnnnnnnnnnnnnnnnnnnnnnnnnnnnnnnnnnnnnnnnnnnnnnnnnnnnnnnnnnnnnnnnnnnnnnnnnnnnnnnnnnnnnnnnnnnnnnnnnnnnnnnnnnnnnnnnnnnnnnnnnnnnnnnnnnnnnnnnnnnnnnnnnnnnnnnnnnnnnnnnnnnnnnnnnnnnnnnnnnnnnnnnnnnnnnnnnnnnnnnnnnnnnnnnnnnnnnnnnnnnnnnnnnnnnnnnnnnnnnnnnnnnnnnnnnnnnnnnnnnnnnnnnnnnnnnnnnnnnnnnnnnnnnnnnnnnnnnnnnnnnnnnnnnnnnnnnnnnnnnnnnnnnnnnnnnnnnnnnnnnnnnnnnnnnnnnnnnnnnnnnnnnnnnnnnnnnnnnnnnnnnnnnnnnnnnnnnnnnnnnnnnnnnnnnnnnnnnnnnnnnnnnnnnnnnnnnnnnnnnnnnnnnnnnnnnnnnnnnnnnnnnnnnnnnnnnnnnnnnnnnnnnnnnnnnnnnnnnnnnnnnnnnnnnnnnnnnnnnnnnnnnnnnnnnnnnnnnnnnnnnnnnnnnnnnnnnnnnnnnnnnnnnnnnnnnnnnnnnnnnnnnnnnnnnnnnnnnnnnnnnnnnnnnnnnnnnnnnnnnnnnnnnnnnnnnnnnnnnnnnnnnnnnnnnnnnnnnnnnnnnnnnnnnnnnnnnnnnnnnnnnnnnnnnnnnnnnnnnnnnnnnnnnnnnnnnnnnnnnnnnnnnnnnnnnnnnnnnnnnnnnnnnnnnnnnnnnnnnnnnnnnnnnnnnnnnnnnnnnnnnnnnnnnnnnnnnnnnnnnnnnnnnnnnnnnnnnnnnnnnnnnnnnnnnnnnnnnnnnnnnnnnnnnnnnnnnnnnnnnnnnnnnnnnnnnnnnnnnnnnnnnnnnnnnnnnnnnnnnnnnnnnnnnnnnnnnnnnnnnnnnnnnnnnnnnnnnnnnnnnnnnnnnnnnnnnnnnnnnnnnnnnnnnnnnnnnnnnnnnnnnnnnnnnnnnnnnnnnnnnnnnnnnnnnnnnnnnnnnnnnnnnnnnnnnnnnnnnnnnnnnnnnnnnnnnnnnnnnnnnnnnnnnnnnnnnnnnnnnnnnnnnnnnnnnnnnnnnnnnnnnnnnnnnnnnnnnnnnnnnnnnnnnnnnnnnnnnnnnnnnnnnnnnnnnnnnnnnnnnnnnnnnnnnnnnnnnnnnnnnnnnnnnnnnnnnnnnnnnnnnnnnnnnnnnnnnnnnnnnnnnnnnnnnnnnnnnnnnnnnnnnnnnnnnnnnnnnnnnnnnnnnnnnnnnnnnnnnnnnnnnnnnnnnnnnnnnnnnnnnnnnnnnnnnnnnnnnnnnnnnnnnnnnnnnnnnnnnnnnnnnnnnnnnnnnnnnnnnnnnnnnnnnnnnnnnnnnnnnnnnnnnnnnnnnnnnnnnnnnnnnnnnnnnnnnnnnnnnnnnnnnnnnnnnnnnnnnnnnnnnnnnnnnnnnnnnnnnnnnnnnnnnnnnnnnnnnnnnnnnnnnnnnnnnnnnnnnnnnnnnnnnnnnnnnnnnnnnnnnnnnnnnnnnnnnnnnnnnnnnnnnnnnnnnnnnnnnnnnnnnnnnnnnnnnnnnnnnnnnnnnnnnnnnnnnnnnnnnnnnnnnnnnnnnnnnnnnnnnnnnnnnnnnnnnnnnnnnnnnnnnnnnnnnnnnnnnnnnnnnnnnnnnnnnnnnnnnnnnnnnnnnnnnnnnnnnnnnnnnnnnnnnnnnnnnnnnnnnnnnnnnnnnnnnnnnnnnnnnnnnnnnnnnnnnnnnnnnnnnnnnnnnnnnnnnnnnnnnnnnnnnnnnnnnnnnnnnnnnnnnnnnnnnnnnnnnnnnnnnnnnnnnnnnnnnnnnnnnnnnnnnnnnnnnnnnnnnnnnnnnnnnnnnnnnnnnnnnnnnnnnnnnnnnnnnnnnnnnnnnnnnnnnnnnnnnnnnnnnnnnnnnnnnnnnnnnnnnnnnnnnnnnnnnnnnnnnnnnnnnnnnnnnnnnnnnnnnnnnnnnnnnnnnnnnnnnnnnnnnnnnnnnnnnnnnnnnnnnnnnnnnnnnnnnnnnnnnnnnnnnnnnnnnnnnnnnnnnnnnnnnnnnnnnnnnnnnnnnnnnnnnnnnnnnnnnnnnnnnnnnnnnnnnnnnnnnnnnnnnnnnnnnnnnnnnnnnnnnnnnnnnnnnnnnnnnnnnnnnnnnnnnnnnnnnnnnnnnnnnnnnnnnnnnnnnnnnnnnnnnnnnnnnnnnnnnnnnnnnnnnnnnnnnnnnnnnnnnnnnnnnnnnnnnnnnnnnnnnnnnnnnnnnnnnnnnnnnnnnnnnnnnnnnnnnnnnnnnnnnnnnnnnnnnnnnnnnnnnnnnnnnnnnnnnnnnnnnnnnnnnnnnnnnnnnnnnnnnnnnnnnnnnnnnnnnnnnnnnnnnnnnnnnnnnnnnnnnnnnnnnnnnnnnnnnnnnnnnnnnnnnnnnnnnnnnnnnnnnnnnnnnnnnnnnnnnnnnnnnnnnnnnnnnnnnnnnnnnnnnnnnnnnnnnnnnnnnnnnnnnnnnnnnnnnnnnnnnnnnnnnnnnnnnnnnnnnnnnnnnnnnnnnnnnnnnnnnnnnnnnnnnnnnnnnnnnnnnnnnnnnnnnnnnnnnnnnnnnnnnnnnnnnnnnnnnnnnnnnnnnnnnnnnnnnnnnnnnnnnnnnnnnnnnnnnnnnnnnnnnnnnnnnnnnnnnnnnnnnnnnnnnnnnnnnnnnnnnnnnnnnnnnnnnnnnnnnnnnnnnnnnnnnnnnnnnnnnnnnnnnnnnnnnnnnnnnnnnnnnnnnnnnnnnnnnnnnnnnnnnnnnnnnnnnnnnnnnnnnnnnnnnnnnnnnnnnnnnnnnnnnnnnnnnnnnnnnnnnnnnnnnnnnnnnnnnnnnnnnnnnnnnnnnnnnnnnnnnnnnnnnnnnnnnnnnnnnnnnnnnnnnnnnnnnnnnnnnnnnnnnnnnnnnnnnnnnnnnnnnnnnnnnnnnnnnnnnnnnnnnnnnnnnnnnnnnnnnnnnnnnnnnnnnnnnnnnnnnnnnnnnnnnnnnnnnnnnnnnnnnnnnnnnnnnnnnnnnnnnnnnnnnnnnnnnnnnnnnnnnnnnnnnnnnnnnnnnnnnnnnnnnnnnnnnnnnnnnnnnnnnnnnnnnnnnnnnnnnnnnnnnnnnnnnnnnnnnnnnnnnnnnnnnnnnnnnnnnnnnnnnnnnnnnnnnnnnnnnnnnnnnnnnnnnnnnnnnnnnnnnnnnnnnnnnnnnnnnnnnnnnnnnnnnnnnnnnnnnnnnnnnnnnnnnnnnnnnnnnnnnnnnnnnnnnnnnnnnnnnnnnnnnnnnnnnnnnnnnnnnnnnnnnnnnnnnnnnnnnnnnnnnnnnnnnnnnnnnnnnnnnnnnnnnnnnnnnnnnnnnnnnnnnnnnnnnnnnnnnnnnnnnnnnnnnnnnnnnnnnnnnnnnnnnnnnnnnnnnnnnnnnnnnnnnnnnnnnnnnnnnnnnnnnnnnnnnnnnnnnnnnnnnnnnnnnnnnnnnnnnnnnnnnnnnnnnnnnnnnnnnnnnnnnnnnnnnnnnnnnnnnnnnnnnnnnnnnnnnnnnnnnnnnnnnnnnnnnnnnnnnnnnnnnnnnnnnnnnnnnnnnnnnnnnnnnnnnnnnnnnnnnnnnnnnnnnnnnnnnnnnnnnnnnnnnnnnnnnnnnnnnnnnnnnnnnnnnnnnnnnnnnnnnnnnnnnnnnnnnnnnnnnnnnnnnnnnnnnnnnnnnnnnnnnnnnnnnnnnnnnnnnnnnnnnnnnnnnnnnnnnnnnnnnnnnnnnnnnnnnnnnnnnnnnnnnnnnnnnnnnnnnnnnnnnnnnnnnnnnnnnnnnnnnnnnnnnnnnnnnnnnnnnnnnnnnnnnnnnnnnnnnnnnnnnnnnnnnnnnnnnnnnnnnnnnnnnnnnnnnnnnnnnnnnnnnnnnnnnnnnnnnnnnnnnnnnnnnnnnnnnnnnnnnnnnnnnnnnnnnnnnnnnnnnnnnnnnnnnnnnnnnnnnnnnnnnnnnnnnnnnnnnnnnnnnnnnnnnnnnnnnnnnnnnnnnnnnnnnnnnnnnnnnnnnnnnnnnnnnnnnnnnnnnnnnnnnnnnnnnnnnnnnnnnnnnnnnnnnnnnnnnnnnnnnnnnnnnnnnnnnnnnnnnnnnnnnnnnnnnnnnnnnnnnnnnnnnnnnnnnnnnnnnnnnnnnnnnnnnnnnnnnnnnnnnnnnnnnnnnnnnnnnnnnnnnnnnnnnnnnnnnnnnnnnnnnnnnnnnnnnnnnnnnnnnnnnnnnnnnnnnnnnnnnnnnnnnnnnnnnnnnnnnnnnnnnnnnnnnnnnnnnnnnnnnnnnnnnnnnnnnnnnnnnnnnnnnnnnnnnnnnnnnnnnnnnnnnnnnnnnnnnnnnnnnnnnnnnnnnnnnnnnnnnnnnnnnnnnnnnnnnnnnnnnnnnnnnnnnnnnnnnnnnnnnnnnnnnnnnnnnnnnnnnnnnnnnnnnnnnnnnnnnnnnnnnnnnnnnnnnnnnnnnnnnnnnnnnnnnnnnnnnnnnnnnnnnnnnnnnnnnnnnnnnnnnnnnnnnnnnnnnnnnnnnnnnnnnnnnnnnnnnnnnnnnnnnnnnnnnnnnnnnnnnnnnnnnnnnnnnnnnnnnnnnnnnnnnnnnnnnnnnnnnnnnnnnnnnnnnnnnnnnnnnnnnnnnnnnnnnnnnnnnnnnnnnnnnnnnnnnnnnnnnnnnnnnnnnnnnnnnnnnnnnnnnnnnnnnnnnnnnnnnnnnnnnnnnnnnnnnnnnnnnnnnnnnnnnnnnnnnnnnnnnnnnnnnnnnnnnnnnnnnnnnnnnnnnnnnnnnnnnnnnnnnnnnnnnnnnnnnnnnnnnnnnnnnnnnnnnnnnnnnnnnnnnnnnnnnnnnnnnnnnnnnnnnnnnnnnnnnnnnnnnnnnnnnnnnnnnnnnnnnnnnnnnnnnnnnnnnnnnnnnnnnnnnnnnnnnnnnnnnnnnnnnnnnnnnnnnnnnnnnnnnnnnnnnnnnnnnnnnnnnnnnnnnnnnnnnnnnnnnnnnnnnnnnnnnnnnnnnnnnnnnnnnnnnnnnnnnnnnnnnnnnnnnnnnnnnnnnnnnnnnnnnnnnnnnnnnnnnnnnnnnnnnnnnnnnnnnnnnnnnnnnnnnnnnnnnnnnnnnnnnnnnnnnnnnnnnnnnnnnnnnnnnnnnnnnnnnnnnnnnnnnnnnnnnnnnnnnnnnnnnnnnnnnnnnnnnnnnnnnnnnnnnnnnnnnnnnnnnnnnnnnnnnnnnnnnnnnnnnnnnnnnnnnnnnnnnnnnnnnnnnnnnnnnnnnnnnnnnnnnnnnnnnnnnnnnnnnnnnnnnnnnnnnnnnnnnnnnnnnnnnnnnnnnnnnnnnnnnnnnnnnnnnnnnnnnnnnnnnnnnnnnnnnnnnnnnnnnnnnnnnnnnnnnnnnnnnnnnnnnnnnnnnnnnnnnnnnnnnnnnnnnnnnnnnnnnnnnnnnnnnnnnnnnnnnnnnnnnnnnnnnnnnnnnnnnnnnnnnnnnnnnnnnnnnnnnnnnnnnnnnnnnnnnnnnnnnnnnnnnnnnnnnnnnnnnnnnnnnnnnnnnnnnnnnnnnnnnnnnnnnnnnnnnnnnnnnnnnnnnnnnnnnnnnnnnnnnnnnnnnnnnnnnnnnnnnnnnnnnnnnnnnnnnnnnnnnnnnnnnnnnnnnnnnnnnnnnnnnnnnnnnnnnnnnnnnnnnnnnnnnnnnnnnnnnnnnnnnnnnnnnnnnnnnnnnnnnnnnnnnnnnnnnnnnnnnnnnnnnnnnnnnnnnnnnnnnnnnnnnnnnnnnnnnnnnnnnnnnnnnnnnnnnnnnnnnnnnnnnnnnnnnnnnnnnnnnnnnnnnnnnnnnnnnnnnnnnnnnnnnnnnnnnnnnnnnnnnnnnnnnnnnnnnnnnnnnnnnnnnnnnnnnnnnnnnnnnnnnnnnnnnnnnnnnnnnnnnnnnnnnnnnnnnnnnnnnnnnnnnnnnnnnnnnnnnnnnnnnnnnnnnnnnnnnnnnnnnnnnnnnnnnnnnnnnnnnnnnnnnnnnnnnnnnnnnnnnnnnnnnnnnnnnnnnnnnnnnnnnnnnnnnnnnnnnnnnnnnnnnnnnnnnnnnnnnnnnnnnnnnnnnnnnnnnnnnnnnnnnnnnnnnnnnnnnnnnnnnnnnnnnnnnnnnnnnnnnnnnnnnnnnnnnnnnnnnnnnnnnnnnnnnnnnnnnnnnnnnnnnnnnnnnnnnnnnnnnnnnnnnnnnnnnnnnnnnnnnnnnnnnnnnnnnnnnnnnnnnnnnnnnnnnnnnnnnnnnnnnnnnnnnnnnnnnnnnnnnnnnnnnnnnnnnnnnnnnnnnnnnnnnnnnnnnnnnnnnnnnnnnnnnnnnnnnnnnnnnnnnnnnnnnnnnnnnnnnnnnnnnnnnnnnnnnnnnnnnnnnnnnnnnnnnnnnnnnnnnnnnnnnnnnnnnnnnnnnnnnnnnnnnnnnnnnnnnnnnnnnnnnnnnnnnnnnnnnnnnnnnnnnnnnnnnnnnnnnnnnnnnnnnnnnnnnnnnnnnnnnnnnnnnnnnnnnnnnnnnnnnnnnnnnnnnnnnnnnnnnnnnnnnnnnnnnnnnnnnnnnnnnnnnnnnnnnnnnnnnnnnnnnnnnnnnnnnnnnnnnnnnnnnnnnnnnnnnnnnnnnnnnnnnnnnnnnnnnnnnnnnnnnnnnnnnnnnnnnnnnnnnnnnnnnnnnnnnnnnnnnnnnnnnnnnnnnnnnnnnnnnnnnnnnnnnnnnnnnnnnnnnnnnnnnnnnnnnnnnnnnnnnnnnnnnnnnnnnnnnnnnnnnnnnnnnnnnnnnnnnnnnnnnnnnnnnnnnnnnnnnnnnnnnnnnnnnnnnnnnnnnnnnnnnnnnnnnnnnnnnnnnnnnnnnnnnnnnnnnnnnnnnnnnnnnnnnnnnnnnnnnnnnnnnnnnnnnnnnnnnnnnnnnnnnnnnnnnnnnnnnnnnnnnnnnnnnnnnnnnnnnnnnnnnnnnnnnnnnnnnnnnnnnnnnnnnnnnnnnnnnnnnnnnnnnnnnnnnnnnnnnnnnnnnnnnnnnnnnnnnnnnnnnnnnnnnnnnnnnnnnnnnnnnnnnnnnnnnnnnnnnnnnnnnnnnnnnnnnnnnnnnnnnnnnnnnnnnnnnnnnnnnnnnnnnnnnnnnnnnnnnnnnnnnnnnnnnnnnnnnnnnnnnnnnnnnnnnnnnnnnnnnnnnnnnnnnnnnnnnnnnnnnnnnnnnnnnnnnnnnnnnnnnnnnnnnnnnnnnnnnnnnnnnnnnnnnnnnnnnnnnnnnnnnnnnnnnnnnnnnnnnnnnnnnnnnnnnnnnnnnnnnnnnnnnnnnnnnnnnnnnnnnnnnnnnnnnnnnnnnnnnnnnnnnnnnnnnnnnnnnnnnnnnnnnnnnnnnnnnnnnnnnnnnnnnnnnnnnnnnnnnnnnnnnnnnnnnnnnnnnnnnnnnnnnnnnnnnnnnnnnnnnnnnnnnnnnnnnnnnnnnnnnnnnnnnnnnnnnnnnnnnnnnnnnnnnnnnnnnnnnnnnnnnnnnnnnnnnnnnnnnnnnnnnnnnnnnnnnnnnnnnnnnnnnnnnnnnnnnnnnnnnnnnnnnnnnnnnnnnnnnnnnnnnnnnnnnnnnnnnnnnnnnnnnnnnnnnnnnnnnnnnnnnnnnnnnnnnnnnnnnnnnnnnnnnnnnnnnnnnnnnnnnnnnnnnnnnnnnnnnnnnnnnnnnnnnnnnnnnnnnnnnnnnnnnnnnnnnnnnnnnnnnnnnnnnnnnnnnnnnnnnnnnnnnnnnnnnnnnnnnnnnnnnnnnnnnnnnnnnnnnnnnnnnnnnnnnnnnnnnnnnnnnnnnnnnnnnnnnnnnnnnnnnnnnnnnnnnnnnnnnnnnnnnnnnnnnnnnnnnnnnnnnnnnnnnnnnnnnnnnnnnnnnnnnnnnnnnnnnnnnnnnnnnnnnnnnnnnnnnnnnnnnnnnnnnnnnnnnnnnnnnnnnnnnnnnnnnnnnnnnnnnnnnnnnnnnnnnnnnnnnnnnnnnnnnnnnnnnnnnnnnnnnnnnnnnnnnnnnnnnnnnnnnnnnnnnnnnnnnnnnnnnnnnnnnnnnnnnnnnnnnnnnnnnnnnnnnnnnnnnnnnnnnnnnnnnnnnnnnnnnnnnnnnnnnnnnnnnnnnnnnnnnnnnnnnnnnnnnnnnnnnnnnnnnnnnnnnnnnnnnnnnnnnnnnnnnnnnnnnnnnnnnnnnnnnnnnnnnnnnnnnnnnnnnnnnnnnnnnnnnnnnnnnnnnnnnnnnnnnnnnnnnnnnnnnnnnnnnnnnnnnnnnnnnnnnnnnnnnnnnnnnnnnnnnnnnnnnnnnnnnnnnnnnnnnnnnnnnnnnnnnnnnnnnnnnnnnnnnnnnnnnnnnnnnnnnnnnnnnnnnnnnnnnnnnnnnnnnnnnnnnnnnnnnnnnnnnnnnnnnnnnnnnnnnnnnnnnnnnnnnnnnnnnnnnnnnnnnnnnnnnnnnnnnnnnnnnnnnnnnnnnnnnnnnnnnnnnnnnnnnnnnnnnnnnnnnnnnnnnnnnnnnnnnnnnnnnnnnnnnnnnnnnnnnnnnnnnnnnnnnnnnnnnnnnnnnnnnnnnnnnnnnnnnnnnnnnnnnnnnnnnnnnnnnnnnnnnnnnnnnnnnnnnnnnnnnnnnnnnnnnnnnnnnnnnnnnnnnnnnnnnnnnnnnnnnnnnnnnnnnnnnnnnnnnnnnnnnnnnnnnnnnnnnnnnnnnnnnnnnnnnnnnnnnnnnnnnnnnnnnnnnnnnnnnnnnnnnnnnnnnnnnnnnnnnnnnnnnnnnnnnnnnnnnnnnnnnnnnnnnnnnnnnnnnnnnnnnnnnnnnnnnnnnnnnnnnnnnnnnnnnnnnnnnnnnnnnnnnnnnnnnnnnnnnnnnnnnnnnnnnnnnnnnnnnnnnnnnnnnnnnnnnnnnnnnnnnnnnnnnnnnnnnnnnnnnnnnnnnnnnnnnnnnnnnnnnnnnnnnnnnnnnnnnnnnnnnnnnnnnnnnnnnnnnnnnnnnnnnnnnnnnnnnnnnnnnnnnnnnnnnnnnnnnnnnnnnnnnnnnnnnnnnnnnnnnnnnnnnnnnnnnnnnnnnnnnnnnnnnnnnnnnnnnnnnnnnnnnnnnnnnnnnnnnnnnnnnnnnnnnnnnnnnnnnnnnnnnnnnnnnnnnnnnnnnnnnnnnnnnnnnnnnnnnnnnnnnnnnnnnnnnnnnnnnnnnnnnnnnnnnnnnnnnnnnnnnnnnnnnnnnnnnnnnnnnnnnnnnnnnnnnnnnnnnnnnnnnnnnnnnnnnnnnnnnnnnnnnnnnnnnnnnnnnnnnnnnnnnnnnnnnnnnnnnnnnnnnnnnnnnnnnnnnnnnnnnnnnnnnnnnnnnnnnnnnnnnnnnnnnnnnnnnnnnnnnnnnnnnnnnnnnnnnnnnnnnnnnnnnnnnnnnnnnnnnnnnnnnnnnnnnnnnnnnnnnnnnnnnnnnnnnnnnnnnnnnnnnnnnnnnnnnnnnnnnnnnnnnnnnnnnnnnnnnnnnnnnnnnnnnnnnnnnnnnnnnnnnnnnnnnnnnnnnnnnnnnnnnnnnnnnnnnnnnnnnnnnnnnnnnnnnnnnnnnnnnnnnnnnnnnnnnnnnnnnnnnnnnnnnnnnnnnnnnnnnnnnnnnnnnnnnnnnnnnnnnnnnnnnnnnnnnnnnnnnnnnnnnnnnnnnnnnnnnnnnnnnnnnnnnnnnnnnnnnnnnnnnnnnnnnnnnnnnnnnnnnnnnnnnnnnnnnnnnnnnnnnnnnnnnnnnnnnnnnnnnnnnnnnnnnnnnnnnnnnnnnnnnnnnnnnnnnnnnnnnnnnnnnnnnnnnnnnnnnnnnnnnnnnnnnnnnnnnnnnnnnnnnnnnnnnnnnnnnnnnnnnnnnnnnnnnnnnnnnnnnnnnnnnnnnnnnnnnnnnnnnnnnnnnnnnnnnnnnnnnnnnnnnnnnnnnnnnnnnnnnnnnnnnnnnnnnnnnnnnnnnnnnnnnnnnnnnnnnnnnnnnnnnnnnnnnnnnnnnnnnnnnnnnnnnnnnnnnnnnnnnnnnnnnnnnnnnnnnnnnnnnnnnnnnnnnnnnnnnnnnnnnnnnnnnnnnnnnnnnnnnnnnnnnnnnnnnnnnnnnnnnnnnnnnnnnnnnnnnnnnnnnnnnnnnnnnnnnnnnnnnnnnnnnnnnnnnnnnnnnnnnnnnnnnnnnnnnnnnnnnnnnnnnnnnnnnnnnnnnnnnnnnnnnnnnnnnnnnnnnnnnnnnnnnnnnnnnnnnnnnnnnnnnnnnnnnnnnnnnnnnnnnnnnnnnnnnnnnnnnnnnnnnnnnnnnnnnnnnnnnnnnnnnnnnnnnnnnnnnnnnnnnnnnnnnnnnnnnnnnnnnnnnnnnnnnnnnnnnnnnnnnnnnnnnnnnnnnnnnnnnnnnnnnnnnnnnnnnnnnnnnnnnnnnnnnnnnnnnnnnnnnnnnnnnnnnnnnnnnnnnnnnnnnnnnnnnnnnnnnnnnnnnnnnnnnnnnnnnnnnnnnnnnnnnnnnnnnnnnnnnnnnnnnnnnnnnnnnnnnnnnnnnnnnnnnnnnnnnnnnnnnnnnnnnnnnnnnnnnnnnnnnnnnnnnnnnnnnnnnnnnnnnnnnnnnnnnnnnnnnnnnnnnnnnnnnnnnnnnnnnnnnnnnnnnnnnnnnnnnnnnnnnnnnnnnnnnnnnnnnnnnnnnnnnnnnnnnnnnnnnnnnnnnnnnnnnnnnnnnnnnnnnnnnnnnnnnnnnnnnnnnnnnnnnnnnnnnnnnnnnnnnnnnnnnnnnnnnnnnnnnnnnnnnnnnnnnnnnnnnnnnnnnnnnnnnnnnnnnnnnnnnnnnnnnnnnnnnnnnnnnnnnnnnnnnnnnnnnnnnnnnnnnnnnnnnnnnnnnnnnnnnnnnnnnnnnnnnnnnnnnnnnnnnnnnnnnnnnnnnnnnnnnnnnnnnnnnnnnnnnnnnnnnnnnnnnnnnnnnnnnnnnnnnnnnnnnnnnnnnnnnnnnnnnnnnnnnnnnnnnnnnnnnnnnnnnnnnnnnnnnnnnnnnnnnnnnnnnnnnnnnnnnnnnnnnnnnnnnnnnnnnnnnnnnnnnnnnnnnnnnnnnnnnnnnnnnnnnnnnnnnnnnnnnnnnnnnnnnnnnnnnnnnnnnnnnnnnnnnnnnnnnnnnnnnnnnnnnnnnnnnnnnnnnnnnnnnnnnnnnnnnnnnnnnnnnnnnnnnnnnnnnnnnnnnnnnnnnnnnnnnnnnnnnnnnnnnnnnnnnnnnnnnnnnnnnnnnnnnnnnnnnnnnnnnnnnnnnnnnnnnnnnnnnnnnnnnnnnnnnnnnnnnnnnnnnnnnnnnnnnnnnnnnnnnnnnnnnnnnnnnnnnnnnnnnnnnnnnnnnnnnnnnnnnnnnnnnnnnnnnnnnnnnnnnnnnnnnnnnnnnnnnnnnnnnnnnnnnnnnnnnnnnnnnnnnnnnnnnnnnnnnnnnnnnnnnnnnnnnnnnnnnnnnnnnnnnnnnnnnnnnnnnnnnnnnnnnnnnnnnnnnnnnnnnnnnnnnnnnnnnnnnnnnnnnnnnnnnnnnnnnnnnnnnnnnnnnnnnnnnnnnnnnnnnnnnnnnnnnnnnnnnnnnnnnnnnnnnnnnnnnnnnnnnnnnnnnnnnnnnnnnnnnnnnnnnnnnnnnnnnnnnnnnnnnnnnnnnnnnnnnnnnnnnnnnnnnnnnnnnnnnnnnnnnnnnnnnnnnnnnnnnnnnnnnnnnnnnnnnnnnnnnnnnnnnnnnnnnnnnnnnnnnnnnnnnnnnnnnnnnnnnnnnnnnnnnnnnnnnnnnnnnnnnnnnnnnnnnnnnnnnnnnnnnnnnnnnnnnnnnnnnnnnnnnnnnnnnnnnnnnnnnnnnnnnnnnnnnnnnnnnnnnnnnnnnnnnnnnnnnnnnnnnnnnnnnnnnnnnnnnnnnnnnnnnnnnnnnnnnnnnnnnnnnnnnnnnnnnnnnnnnnnnnnnnnnnnnnnnnnnnnnnnnnnnnnnnnnnnnnnnnnnnnnnnnnnnnnnnnnnnnnnnnnnnnnnnnnnnnnnnnnnnnnnnnnnnnnnnnnnnnnnnnnnnnnnnnnnnnnnnnnnnnnnnnnnnnnnnnnnnnnnnnnnnnnnnnnnnnnnnnnnnnnnnnnnnnnnnnnnnnnnnnnnnnnnnnnnnnnnnnnnnnnnnnnnnnnnnnnnnnnnnnnnnnnnnnnnnnnnnnnnnnnnnnnnnnnnnnnnnnnnnnnnnnnnnnnnnnnnnnnnnnnnnnnnnnnnnnnnnnnnnnnnnnnnnnnnnnnnnnnnnnnnnnnnnnnnnnnnnnnnnnnnnnnnnnnnnnnnnnnnnnnnnnnnnnnnnnnnnnnnnnnnnnnnnnnnnnnnnnnnnnnnnnnnnnnnnnnnnnnnnnnnnnnnnnnnnnnnnnnnnnnnnnnnnnnnnnnnnnnnnnnnnnnnnnnnnnnnnnnnnnnnnnnnnnnnnnnnnnnnnnnnnnnnnnnnnnnnnnnnnnnnnnnnnnnnnnnnnnnnnnnnnnnnnnnnnnnnnnnnnnnnnnnnnnnnnnnnnnnnnnnnnnnnnnnnnnnnnnnnnnnnnnnnnnnnnnnnnnnnnnnnnnnnnnnnnnnnnnnnnnnnnnnnnnnnnnnnnnnnnnnnnnnnnnnnnnnnnnnnnnnnnnnnnnnnnnnnnnnnnnnnnnnnnnnnnnnnnnnnnnnnnnnnnnnnnnnnnnnnnnnnnnnnnnnnnnnnnnnnnnnnnnnnnnnnnnnnnnnnnnnnnnnnnnnnnnnnnnnnnnnnnnnnnnnnnnnnnnnnnnnnnnnnnnnnnnnnnnnnnnnnnnnnnnnnnnnnnnnnnnnnnnnnnnnnnnnnnnnnnnnnnnnnnnnnnnnnnnnnnnnnnnnnnnnnnnnnnnnnnnnnnnnnnnnnnnnnnnnnnnnnnnnnnnnnnnnnnnnnnnnnnnnnnnnnnnnnnnnnnnnnnnnnnnnnnnnnnnnnnnnnnnnnnnnnnnnnnnnnnnnnnnnnnnnnnnnnnnnnnnnnnnnnnnnnnnnnnnnnnnnnnnnnnnnnnnnnnnnnnnnnnnnnnnnnnnnnnnnnnnnnnnnnnnnnnnnnnnnnnnnnnnnnnnnnnnnnnnnnnnnnnnnnnnnnnnnnnnnnnnnnnnnnnnnnnnnnnnnnnnnnnnnnnnnnnnnnnnnnnnnnnnnnnnnnnnnnnnnnnnnnnnnnnnnnnnnnnnnnnnnnnnnnnnnnnnnnnnnnnnnnnnnnnnnnnnnnnnnnnnnnnnnnnnnnnnnnnnnnnnnnnnnnnnnnnnnnnnnnnnnnnnnnnnnnnnnnnnnnnnnnnnnnnnnnnnnnnnnnnnnnnnnnnnnnnnnnnnnnnnnnnnnnnnnnnnnnnnnnnnnnnnnnnnnnnnnnnnnnnnnnnnnnnnnnnnnnnnnnnnnnnnnnnnnnnnnnnnnnnnnnnnnnnnnnnnnnnnnnnnnnnnnnnnnnnnnnnnnnnnnnnnnnnnnnnnnnnnnnnnnnnnnnnnnnnnnnnnnnnnnnnnnnnnnnnnnnnnnnnnnnnnnnnnnnnnnnnnnnnnnnnnnnnnnnnnnnnnnnnnnnnnnnnnnnnnnnnnnnnnnnnnnnnnnnnnnnnnnnnnnnnnnnnnnnnnnnnnnnnnnnnnnnnnnnnnnnnnnnnnnnnnnnnnnnnnnnnnnnnnnnnnnnnnnnnnnnnnnnnnnnnnnnnnnnnnnnnnnnnnnnnnnnnnnnnnnnnnnnnnnnnnnnnnnnnnnnnnnnnnnnnnnnnnnnnnnnnnnnnnnnnnnnnnnnnnnnnnnnnnnnnnnnnnnnnnnnnnnnnnnnnnnnnnnnnnnnnnnnnnnnnnnnnnnnnnnnnnnnnnnnnnnnnnnnnnnnnnnnnnnnnnnnnnnnnnnnnnnnnnnnnnnnnnnnnnnnnnnnnnnnnnnnnnnnnnnnnnnnnnnnnnnnnnnnnnnnnnnnnnnnnnnnnnnnnnnnnnnnnnnnnnnnnnnnnnnnnnnnnnnnnnnnnnnnnnnnnnnnnnnnnnnnnnnnnnnnnnnnnnnnnnnnnnnnnnnnnnnnnnnnnnnnnnnnnnnnnnnnnnnnnnnnnnnnnnnnnnnnnnnnnnnnnnnnnnnnnnnnnnnnnnnnnnnnnnnnnnnnnnnnnnnnnnnnnnnnnnnnnnnnnnnnnnnnnnnnnnnnnnnnnnnnnnnnnnnnnnnnnnnnnnnnnnnnnnnnnnnnnnnnnnnnnnnnnnnnnnnnnnnnnnnnnnnnnnnnnnnnnnnnnnnnnnnnnnnnnnnnnnnnnnnnnnnnnnnnnnnnnnnnnnnnnnnnnnnnnnnnnnnnnnnnnnnnnnnnnnnnnnnnnnnnnnnnnnnnnnnnnnnnnnnnnnnnnnnnnnnnnnnnnnnnnnnnnnnnnnnnnnnnnnnnnnnnnnnnnnnnnnnnnnnnnnnnnnnnnnnnnnnnnnnnnnnnnnnnnnnnnnnnnnnnnnnnnnnnnnnnnnnnnnnnnnnnnnnnnnnnnnnnnnnnnnnnnnnnnnnnnnnnnnnnnnnnnnnnnnnnnnnnnnnnnnnnnnnnnnnnnnnnnnnnnnnnnnnnnnnnnnnnnnnnnnnnnnnnnnnnnnnnnnnnnnnnnnnnnnnnnnnnnnnnnnnnnnnnnnnnnnnnnnnnnnnnnnnnnnnnnnnnnnnnnnnnnnnnnnnnnnnnnnnnnnnnnnnnnnnnnnnnnnnnnnnnnnnnnnnnnnnnnnnnnnnnnnnnnnnnnnnnnnnnnnnnnnnnnnnnnnnnnnnnnnnnnnnnnnnnnnnnnnnnnnnnnnnnnnnnnnnnnnnnnnnnnnnnnnnnnnnnnnnnnnnnnnnnnnnnnnnnnnnnnnnnnnnnnnnnnnnnnnnnnnnnnnnnnnnnnnnnnnnnnnnnnnnnnnnnnnnnnnnnnnnnnnnnnnnnnnnnnnnnnnnnnnnnnnnnnnnnnnnnnnnnnnnnnnnnnnnnnnnnnnnnnnnnnnnnnnnnnnnnnnnnnnnnnnnnnnnnnnnnnnnnnnnnnnnnnnnnnnnnnnnnnnnnnnnnnnnnnnnnnnnnnnnnnnnnnnnnnnnnnnnnnnnnnnnnnnnnnnnnnnnnnnnnnnnnnnnnnnnnnnnnnnnnnnnnnnnnnnnnnnnnnnnnnnnnnnnnnnnnnnnnnnnnnnnnnnnnnnnnnnnnnnnnnnnnnnnnnnnnnnnnnnnnnnnnnnnnnnnnnnnnnnnnnnnnnnnnnnnnnnnnnnnnnnnnnnnnnnnnnnnnnnnnnnnnnnnnnnnnnnnnnnnnnnnnnnnnnnnnnnnnnnnnnnnnnnnnnnnnnnnnnnnnnnnnnnnnnnnnnnnnnnnnnnnnnnnnnnnnnnnnnnnnnnnnnnnnnnnnnnnnnnnnnnnnnnnnnnnnnnnnnnnnnnnnnnnnnnnnnnnnnnnnnnnnnnnnnnnnnnnnnnnnnnnnnnnnnnnnnnnnnnnnnnnnnnnnnnnnnnnnnnnnnnnnnnnnnnnnnnnnnnnnnnnnnnnnnnnnnnnnnnnnnnnnnnnnnnnnnnnnnnnnnnnnnnnnnnnnnnnnnnnnnnnnnnnnnnnnnnnnnnnnnnnnnnnnnnnnnnnnnnnnnnnnnnnnnnnnnnnnnnnnnnnnnnnnnnnnnnnnnnnnnnnnnnnnnnnnnnnnnnnnnnnnnnnnnnnnnnnnnnnnnnnnnnnnnnnnnnnnnnnnnnnnnnnnnnnnnnnnnnnnnnnnnnnnnnnnnnnnnnnnnnnnnnnnnnnnnnnnnnnnnnnnnnnnnnnnnnnnnnnnnnnnnnnnnnnnnnnnnnnnnnnnnnnnnnnnnnnnnnnnnnnnnnnnnnnnnnnnnnnnnnnnnnnnnnnnnnnnnnnnnnnnnnnnnnnnnnnnnnnnnnnnnnnnnnnnnnnnnnnnnnnnnnnnnnnnnnnnnnnnnnnnnnnnnnnnnnnnnnnnnnnnnnnnnnnnnnnnnnnnnnnnnnnnnnnnnnnnnnnnnnnnnnnnnnnnnnnnnnnnnnnnnnnnnnnnnnnnnnnnnnnnnnnnnnnnnnnnnnnnnnnnnnnnnnnnnnnnnnnnnnnnnnnnnnnnnnnnnnnnnnnnnnnnnnnnnnnnnnnnnnnnnnnnnnnnnnnnnnnnnnnnnnnnnnnnnnnnnnnnnnnnnnnnnnnnnnnnnnnnnnnnnnnnnnnnnnnnnnnnnnnnnnnnnnnnnnnnnnnnnnnnnnnnnnnnnnnnnnnnnnnnnnnnnnnnnnnnnnnnnnnnnnnnnnnnnnnnnnnnnnnnnnnnnnnnnnnnnnnnnnnnnnnnnnnnnnnnnnnnnnnnnnnnnnnnnnnnnnnnnnnnnnnnnnnnnnnnnnnnnnnnnnnnnnnnnnnnnnnnnnnnnnnnnnnnnnnnnnnnnnnnnnnnnnnnnnnnnnnnnnnnnnnnnnnnnnnnnnnnnnnnnnnnnnnnnnnnnnnnnnnnnnnnnnnnnnnnnnnnnnnnnnnnnnnnnnnnnnnnnnnnnnnnnnnnnnnnnnnnnnnnnnnnnnnnnnnnnnnnnnnnnnnnnnnnnnnnnnnnnnnnnnnnnnnnnnnnnnnnnnnnnnnnnnnnnnnnnnnnnnnnnnnnnnnnnnnnnnnnnnnnnnnnnnnnnnnnnnnnnnnnnnnnnnnnnnnnnnnnnnnnnnnnnnnnnnnnnnnnnnnnnnnnnnnnnnnnnnnnnnnnnnnnnnnnnnnnnnnnnnnnnnnnnnnnnnnnnnnnnnnnnnnnnnnnnnnnnnnnnnnnnnnnnnnnnnnnnnnnnnnnnnnnnnnnnnnnnnnnnnnnnnnnnnnnnnnnnnnnnnnnnnnnnnnnnnnnnnnnnnnnnnnnnnnnnnnnnnnnnnnnnnnnnnnnnnnnnnnnnnnnnnnnnnnnnnnnnnnnnnnnnnnnnnnnnnnnnnnnnnnnnnnnnnnnnnnnnnnnnnnnnnnnnnnnnnnnnnnnnnnnnnnnnnnnnnnnnnnnnnnnnnnnnnnnnnnnnnnnnnnnnnnnnnnnnnnnnnnnnnnnnnnnnnnnnnnnnnnnnnnnnnnnnnnnnnnnnnnnnnnnnnnnnnnnnnnnnnnnnnnnnnnnnnnnnnnnnnnnnnnnnnnnnnnnnnnnnnnnnnnnnnnnnnnnnnnnnnnnnnnnnnnnnnnnnnnnnnnnnnnnnnnnnnnnnnnnnnnnnnnnnnnnnnnnnnnnnnnnnnnnnnnnnnnnnnnnnnnnnnnnnnnnnnnnnnnnnnnnnnnnnnnnnnnnnnnnnnnnnnnnnnnnnnnnnnnnnnnnnnnnnnnnnnnnnnnnnnnnnnnnnnnnnnnnnnnnnnnnnnnnnnnnnnnnnnnnnnnnnnnnnnnnnnnnnnnnnnnnnnnnnnnnnnnnnnnnnnnnnnnnnnnnnnnnnnnnnnnnnnnnnnnnnnnnnnnnnnnnnnnnnnnnnnnnnnnnnnnnnnnnnnnnnnnnnnnnnnnnnnnnnnnnnnnnnnnnnnnnnnnnnnnnnnnnnnnnnnnnnnnnnnnnnnnnnnnnnnnnnnnnnnnnnnnnnnnnnnnnnnnnnnnnnnnnnnnnnnnnnnnnnnnnnnnnnnnnnnnnnnnnnnnnnnnnnnnnnnnnnnnnnnnnnnnnnnnnnnnnnnnnnnnnnnnnnnnnnnnnnnnnnnnnnnnnnnnnnnnnnnnnnnnnnnnnnnnnnnnnnnnnnnnnnnnnnnnnnnnnnnnnnnnnnnnnnnnnnnnnnnnnnnnnnnnnnnnnnnnnnnnnnnnnnnnnnnnnnnnnnnnnnnnnnnnnnnnnnnnnnnnnnnnnnnnnnnnnnnnnnnnnnnnnnnnnnnnnnnnnnnnnnnnnnnnnnnnnnnnnnnnnnnnnnnnnnnnnnnnnnnnnnnnnnnnnnnnnnnnnnnnnnnnnnnnnnnnnnnnnnnnnnnnnnnnnnnnnnnnnnnnnnnnnnnnnnnnnnnnnnnnnnnnnnnnnnnnnnnnnnnnnnnnnnnnnnnnnnnnnnnnnnnnnnnnnnnnnnnnnnnnnnnnnnnnnnnnnnnnnnnnnnnnnnnnnnnnnnnnnnnnnnnnnnnnnnnnnnnnnnnnnnnnnnnnnnnnnnnnnnnnnnnnnnnnnnnnnnnnnnnnnnnnnnnnnnnnnnnnnnnnnnnnnnnnnnnnnnnnnnnnnnnnnnnnnnnnnnnnnnnnnnnnnnnnnnnnnnnnnnnnnnnnnnnnnnnnnnnnnnnnnnnnnnnnnnnnnnnnnnnnnnnnnnnnnnnnnnnnnnnnnnnnnnnnnnnnnnnnnnnnnnnnnnnnnnnnnnnnnnnnnnnnnnnnnnnnnnnnnnnnnnnnnnnnnnnnnnnnnnnnnnnnnnnnnnnnnnnnnnnnnnnnnnnnnnnnnnnnnnnnnnnnnnnnnnnnnnnnnnnnnnnnnnnnnnnnnnnnnnnnnnnnnnnnnnnnnnnnnnnnnnnnnnnnnnnnnnnnnnnnnnnnnnnnnnnnnnnnnnnnnnnnnnnnnnnnnnnnnnnnnnnnnnnnnnnnnnnnnnnnnnnnnnnnnnnnnnnnnnnnnnnnnnnnnnnnnnnnnnnnnnnnnnnnnnnnnnnnnnnnnnnnnnnnnnnnnnnnnnnnnnnnnnnnnnnnnnnnnnnnnnnnnnnnnnnnnnnnnnnnnnnnnnnnnnnnnnnnnnnnnnnnnnnnnnnnnnnnnnnnnnnnnnnnnnnnnnnnnnnnnnnnnnnnnnnnnnnnnnnnnnnnnnnnnnnnnnnnnnnnnnnnnnnnnnnnnnnnnnnnnnnnnnnnnnnnnnnnnnnnnnnnnnnnnnnnnnnnnnnnnnnnnnnnnnnnnnnnnnnnnnnnnnnnnnnnnnnnnnnnnnnnnnnnnnnnnnnnnnnnnnnnnnnnnnnnnnnnnnnnnnnnnnnnnnnnnnnnnnnnnnnnnnnnnnnnnnnnnnnnnnnnnnnnnnnnnnnnnnnnnnnnnnnnnnnnnnnnnnnnnnnnnnnnnnnnnnnnnnnnnnnnnnnnnnnnnnnnnnnnnnnnnnnnnnnnnnnnnnnnnnnnnnnnnnnnnnnnnnnnnnnnnnnnnnnnnnnnnnnnnnnnnnnnnnnnnnnnnnnnnnnnnnnnnnnnnnnnnnnnnnnnnnnnnnnnnnnnnnnnnnnnnnnnnnnnnnnnnnnnnnnnnnnnnnnnnnnnnnnnnnnnnnnnnnnnnnnnnnnnnnnnnnnnnnnnnnnnnnnnnnnnnnnnnnnnnnnnnnnnnnnnnnnnnnnnnnnnnnnnnnnnnnnnnnnnnnnnnnnnnnnnnnnnnnnnnnnnnnnnnnnnnnnnnnnnnnnnnnnnnnnnnnnnnnnnnnnnnnnnnnnnnnnnnnnnnnnnnnnnnnnnnnnnnnnnnnnnnnnnnnnnnnnnnnnnnnnnnnnnnnnnnnnnnnnnnnnnnnnnnnnnnnnnnnnnnnnnnnnnnnnnnnnnnnnnnnnnnnnnnnnnnnnnnnnnnnnnnnnnnnnnnnnnnnnnnnnnnnnnnnnnnnnnnnnnnnnnnnnnnnnnnnnnnnnnnnnnnnnnnnnnnnnnnnnnnnnnnnnnnnnnnnnnnnnnnnnnnnnnnnnnnnnnnnnnnnnnnnnnnnnnnnnnnnnnnnnnnnnnnnnnnnnnnnnnnnnnnnnnnnnnnnnnnnnnnnnnnnnnnnnnnnnnnnnnnnnnnnnnnnnnnnnnnnnnnnnnnnnnnnnnnnnnnnnnnnnnnnnnnnnnnnnnnnnnnnnnnnnnnnnnnnnnnnnnnnnnnnnnnnnnnnnnnnnnnnnnnnnnnnnnnnnnnnnnnnnnnnnnnnnnnnnnnnnnnnnnnnnnnnnnnnnnnnnnnnnnnnnnnnnnnnnnnnnnnnnnnnnnnnnnnnnnnnnnnnnnnnnnnnnnnnnnnnnnnnnnnnnnnnnnnnnnnnnnnnnnnnnnnnnnnnnnnnnnnnnnnnnnnnnnnnnnnnnnnnnnnnnnnnnnnnnnnnnnnnnnnnnnnnnnnnnnnnnnnnnnnnnnnnnnnnnnnnnnnnnnnnnnnnnnnnnnnnnnnnnnnnnnnnnnnnnnnnnnnnnnnnnnnnnnnnnnnnnnnnnnnnnnnnnnnnnnnnnnnnnnnnnnnnnnnnnnnnnnnnnnnnnnnnnnnnnnnnnnnnnnnnnnnnnnnnnnnnnnnnnnnnnnnnnnnnnnnnnnnnnnnnnnnnnnnnnnnnnnnnnnnnnnnnnnnnnnnnnnnnnnnnnnnnnnnnnnnnnnnnnnnnnnnnnnnnnnnnnnnnnnnnnnnnnnnnnnnnnnnnnnnnnnnnnnnnnnnnnnnnnnnnnnnnnnnnnnnnnnnnnnnnnnnnnnnnnnnnnnnnnnnnnnnnnnnnnnnnnnnnnnnnnnnnnnnnnnnnnnnnnnnnnnnnnnnnnnnnnnnnnnnnnnnnnnnnnnnnnnnnnnnnnnnnnnnnnnnnnnnnnnnnnnnnnnnnnnnnnnnnnnnnnnnnnnnnnnnnnnnnnnnnnnnnnnnnnnnnnnnnnnnnnnnnnnnnnnnnnnnnnnnnnnnnnnnnnnnnnnnnnnnnnnnnnnnnnnnnnnnnnnnnnnnnnnnnnnnnnnnnnnnnnnnnnnnnnnnnnnnnnnnnnnnnnnnnnnnnnnnnnnnnnnnnnnnnnnnnnnnnnnnnnnnnnnnnnnnnnnnnnnnnnnnnnnnnnnnnnnnnnnnnnnnnnnnnnnnnnnnnnnnnnnnnnnnnnnnnnnnnnnnnnnnnnnnnnnnnnnnnnnnnnnnnnnnnnnnnnnnnnnnnnnnnnnnnnnnnnnnnnnnnnnnnnnnnnnnnnnnnnnnnnnnnnnnnnnnnnnnnnnnnnnnnnnnnnnnnnnnnnnnnnnnnnnnnnnnnnnnnnnnnnnnnnnnnnnnnnnnnnnnnnnnnnnnnnnnnnnnnnnnnnnnnnnnnnnnnnnnnnnnnnnnnnnnnnnnnnnnnnnnnnnnnnnnnnnnnnnnnnnnnnnnnnnnnnnnnnnnnnnnnnnnnnnnnnnnnnnnnnnnnnnnnnnnnnnnnnnnnnnnnnnnnnnnnnnnnnnnnnnnnnnnnnnnnnnnnnnnnnnnnnnnnnnnnnnnnnnnnnnnnnnnnnnnnnnnnnnnnnnnnnnnnnnnnnnnnnnnnnnnnnnnnnnnnnnnnnnnnnnnnnnnnnnnnnnnnnnnnnnnnnnnnnnnnnnnnnnnnnnnnnnnnnnnnnnnnnnnnnnnnnnnnnnnnnnnnnnnnnnnnnnnnnnnnnnnnnnnnnnnnnnnnnnnnnnnnnnnnnnnnnnnnnnnnnnnnnnnnnnnnnnnnnnnnnnnnnnnnnnnnnnnnnnnnnnnnnnnnnnnnnnnnnnnnnnnnnnnnnnnnnnnnnnnnnnnnnnnnnnnnnnnnnnnnnnnnnnnnnnnnnnnnnnnnnnnnnnnnnnnnnnnnnnnnnnnnnnnnnnnnnnnnnnnnnnnnnnnnnnnnnnnnnnnnnnnnnnnnnnnnnnnnnnnnnnnnnnnnnnnnnnnnnnnnnnnnnnnnnnnnnnnnnnnnnnnnnnnnnnnnnnnnnnnnnnnnnnnnnnnnnnnnnnnnnnnnnnnnnnnnnnnnnnnnnnnnnnnnnnnnnnnnnnnnnnnnnnnnnnnnnnnnnnnnnnnnnnnnnnnnnnnnnnnnnnnnnnnnnnnnnnnnnnnnnnnnnnnnnnnnnnnnnnnnnnnnnnnnnnnnnnnnnnnnnnnnnnnnnnnnnnnnnnnnnnnnnnnnnnnnnnnnnnnnnnnnnnnnnnnnnnnnnnnnnnnnnnnnnnnnnnnnnnnnnnnnnnnnnnnnnnnnnnnnnnnnnnnnnnnnnnnnnnnnnnnnnnnnnnnnnnnnnnnnnnnnnnnnnnnnnnnnnnnnnnnnnnnnnnnnnnnnnnnnnnnnnnnnnnnnnnnnnnnnnnnnnnnnnnnnnnnnnnnnnnnnnnnnnnnnnnnnnnnnnnnnnnnnnnnnnnnnnnnnnnnnnnnnnnnnnnnnnnnnnnnnnnnnnnnnnnnnnnnnnnnnnnnnnnnnnnnnnnnnnnnnnnnnnnnnnnnnnnnnnnnnnnnnnnnnnnnnnnnnnnnnnnnnnnnnnnnnnnnnnnnnnnnnnnnnnnnnnnnnnnnnnnnnnnnnnnnnnnnnnnnnnnnnnnnnnnnnnnnnnnnnnnnnnnnnnnnnnnnnnnnnnnnnnnnnnnnnnnnnnnnnnnnnnnnnnnnnnnnnnnnnnnnnnnnnnnnnnnnnnnnnnnnnnnnnnnnnnnnnnnnnnnnnnnnnnnnnnnnnnnnnnnnnnnnnnnnnnnnnnnnnnnnnnnnnnnnnnnnnnnnnnnnnnnnnnnnnnnnnnnnnnnnnnnnnnnnnnnnnnnnnnnnnnnnnnnnnnnnnnnnnnnnnnnnnnnnnnnnnnnnnnnnnnnnnnnnnnnnnnnnnnnnnnnnnnnnnnnnnnnnnnnnnnnnnnnnnnnnnnnnnnnnnnnnnnnnnnnnnnnnnnnnnnnnnnnnnnnnnnnnnnnnnnnnnnnnnnnnnnnnnnnnnnnnnnnnnnnnnnnnnnnnnnnnnnnnnnnnnnnnnnnnnnnnnnnnnnnnnnnnnnnnnnnnnnnnnnnnnnnnnnnnnnnnnnnnnnnnnnnnnnnnnnnnnnnnnnnnnnnnnnnnnnnnnnnnnnnnnnnnnnnnnnnnnnnnnnnnnnnnnnnnnnnnnnnnnnnnnnnnnnnnnnnnnnnnnnnnnnnnnnnnnnnnnnnnnnnnnnnnnnnnnnnnnnnnnnnnnnnnnnnnnnnnnnnnnnnnnnnnnnnnnnnnnnnnnnnnnnnnnnnnnnnnnnnnnnnnnnnnnnnnnnnnnnnnnnnnnnnnnnnnnnnnnnnnnnnnnnnnnnnnnnnnnnnnnnnnnnnnnnnnnnnnnnnnnnnnnnnnnnnnnnnnnnnnnnnnnnnnnnnnnnnnnnnnnnnnnnnnnnnnnnnnnnnnnnnnnnnnnnnnnnnnnnnnnnnnnnnnnnnnnnnnnnnnnnnnnnnnnnnnnnnnnnnnnnnnnnnnnnnnnnnnnnnnnnnnnnnnnnnnnnnnnnnnnnnnnnnnnnnnnnnnnnnnnnnnnnnnnnnnnnnnnnnnnnnnnnnnnnnnnnnnnnnnnnnnnnnnnnnnnnnnnnnnnnnnnnnnnnnnnnnnnnnnnnnnnnnnnnnnnnnnnnnnnnnnnnnnnnnnnnnnnnnnnnnnnnnnnnnnnnnnnnnnnnnnnnnnnnnnnnnnnnnnnnnnnnnnnnnnnnnnnnnnnnnnnnnnnnnnnnnnnnnnnnnnnnnnnnnnnnnnnnnnnnnnnnnnnnnnnnnnnnnnnnnnnnnnnnnnnnnnnnnnnnnnnnnnnnnnnnnnnnnnnnnnnnnnnnnnnnnnnnnnnnnnnnnnnnnnnnnnnnnnnnnnnnnnnnnnnnnnnnnnnnnnnnnnnnnnnnnnnnnnnnnnnnnnnnnnnnnnnnnnnnnnnnnnnnnnnnnnnnnnnnnnnnnnnnnnnnnnnnnnnnnnnnnnnnnnnnnnnnnnnnnnnnnnnnnnnnnnnnnnnnnnnnnnnnnnnnnnnnnnnnnnnnnnnnnnnnnnnnnnnnnnnnnnnnnnnnnnnnnnnnnnnnnnnnnnnnnnnnnnnnnnnnnnnnnnnnnnnnnnnnnnnnnnnnnnnnnnnnnnnnnnnnnnnnnnnnnnnnnnnnnnnnnnnnnnnnnnnnnnnnnnnnnnnnnnnnnnnnnnnnnnnnnnnnnnnnnnnnnnnnnnnnnnnnnnnnnnnnnnnnnnnnnnnnnnnnnnnnnnnnnnnnnnnnnnnnnnnnnnnnnnnnnnnnnnnnnnnnnnnnnnnnnnnnnnnnnnnnnnnnnnnnnnnnnnnnnnnnnnnnnnnnnnnnnnnnnnnnnnnnnnnnnnnnnnnnnnnnnnnnnnnnnnnnnnnnnnnnnnnnnnnnnnnnnnnnnnnnnnnnnnnnnnnnnnnnnnnnnnnnnnnnnnnnnnnnnnnnnnnnnnnnnnnnnnnnnnnnnnnnnnnnnnnnnnnnnnnnnnnnnnnnnnnnnnnnnnnnnnnnnnnnnnnnnnnnnnnnnnnnnnnnnnnnnnnnnnnnnnnnnnnnnnnnnnnnnnnnnnnnnnnnnnnnnnnnnnnnnnnnnnnnnnnnnnnnnnnnnnnnnnnnnnnnnnnnnnnnnnnnnnnnnnnnnnnnnnnnnnnnnnnnnnnnnnnnnnnnnnnnnnnnnnnnnnnnnnnnnnnnnnnnnnnnnnnnnnnnnnnnnnnnnnnnnnnnnnnnnnnnnnnnnnnnnnnnnnnnnnnnnnnnnnnnnnnnnnnnnnnnnnnnnnnnnnnnnnnnnnnnnnnnnnnnnnnnnnnnnnnnnnnnnnnnnnnnnnnnnnnnnnnnnnnnnnnnnnnnnnnnnnnnnnnnnnnnnnnnnnnnnnnnnnnnnnnnnnnnnnnnnnnnnnnnnnnnnnnnnnnnnnnnnnnnnnnnnnnnnnnnnnnnnnnnnnnnnnnnnnnnnnnnnnnnnnnnnnnnnnnnnnnnnnnnnnnnnnnnnnnnnnnnnnnnnnnnnnnnnnnnnnnnnnnnnnnnnnnnnnnnnnnnnnnnnnnnnnnnnnnnnnnnnnnnnnnnnnnnnnnnnnnnnnnnnnnnnnnnnnnnnnnnnnnnnnnnnnnnnnnnnnnnnnnnnnnnnnnnnnnnnnnnnnnnnnnnnnnnnnnnnnnnnnnnnnnnnnnnnnnnnnnnnnnnnnnnnnnnnnnnnnnnnnnnnnnnnnnnnnnnnnnnnnnnnnnnnnnnnnnnnnnnnnnnnnnnnnnnnnnnnnnnnnnnnnnnnnnnnnnnnnnnnnnnnnnnnnnnnnnnnnnnnnnnnnnnnnnnnnnnnnnnnnnnnnnnnnnnnnnnnnnnnnnnnnnnnnnnnnnnnnnnnnnnnnnnnnnnnnnnnnnnnnnnnnnnnnnnnnnnnnnnnnnnnnnnnnnnnnnnnnnnnnnnnnnnnnnnnnnnnnnnnnnnnnnnnnnnnnnnnnnnnnnnnnnnnnnnnnnnnnnnnnnnnnnnnnnnnnnnnnnnnnnnnnnnnnnnnnnnnnnnnnnnnnnnnnnnnnnnnnnnnnnnnnnnnnnnnnnnnnnnnnnnnnnnnnnnnnnnnnnnnnnnnnnnnnnnnnnnnnnnnnnnnnnnnnnnnnnnnnnnnnnnnnnnnnnnnnnnnnnnnnnnnnnnnnnnnnnnnnnnnnnnnnnnnnnnnnnnnnnnnnnnnnnnnnnnnnnnnnnnnnnnnnnnnnnnnnnnnnnnnnnnnnnnnnnnnnnnnnnnnnnnnnnnnnnnnnnnnnnnnnnnnnnnnnnnnnnnnnnnnnnnnnnnnnnnnnnnnnnnnnnnnnnnnnnnnnnnnnnnnnnnnnnnnnnnnnnnnnnnnnnnnnnnnnnnnnnnnnnnnnnnnnnnnnnnnnnnnnnnnnnnnnnnnnnnnnnnnnnnnnnnnnnnnnnnnnnnnnnnnnnnnnnnnnnnnnnnnnnnnnnnnnnnnnnnnnnnnnnnnnnnnnnnnnnnnnnnnnnnnnnnnnnnnnnnnnnnnnnnnnnnnnnnnnnnnnnnnnnnnnnnnnnnnnnnnnnnnnnnnnnnnnnnnnnnnnnnnnnnnnnnnnnnnnnnnnnnnnnnnnnnnnnnnnnnnnnnnnnnnnnnnnnnnnnnnnnnnnnnnnnnnnnnnnnnnnnnnnnnnnnnnnnnnnnnnnnnnnnnnnnnnnnnnnnnnnnnnnnnnnnnnnnnnnnnnnnnnnnnnnnnnnnnnnnnnnnnnnnnnnnnnnnnnnnnnnnnnnnnnnnnnnnnnnnnnnnnnnnnnnnnnnnnnnnnnnnnnnnnnnnnnnnnnnnnnnnnnnnnnnnnnnnnnnnnnnnnnnnnnnnnnnnnnnnnnnnnnnnnnnnnnnnnnnnnnnnnnnnnnnnnnnnnnnnnnnnnnnnnnnnnnnnnnnnnnnnnnnnnnnnnnnnnnnnnnnnnnnnnnnnnnnnnnnnnnnnnnnnnnnnnnnnnnnnnnnnnnnnnnnnnnnnnnnnnnnnnnnnnnnnnnnnnnnnnnnnnnnnnnnnnnnnnnnnnnnnnnnnnnnnnnnnnnnnnnnnnnnnnnnnnnnnnnnnnnnnnnnnnnnnnnnnnnnnnnnnnnnnnnnnnnnnnnnnnnnnnnnnnnnnnnnnnnnnnnnnnnnnnnnnnnnnnnnnnnnnnnnnnnnnnnnnnnnnnnnnnnnnnnnnnnnnnnnnnnnnnnnnnnnnnnnnnnnnnnnnnnnnnnnnnnnnnnnnnnnnnnnnnnnnnnnnnnnnnnnnnnnnnnnnnnnnnnnnnnnnnnnnnnnnnnnnnnnnnnnnnnnnnnnnnnnnnnnnnnnnnnnnnnnnnnnnnnnnnnnnnnnnnnnnnnnnnnnnnnnnnnnnnnnnnnnnnnnnnnnnnnnnnnnnnnnnnnnnnnnnnnnnnnnnnnnnnnnnnnnnnnnnnnnnnnnnnnnnnnnnnnnnnnnnnnnnnnnnnnnnnnnnnnnnnnnnnnnnnnnnnnnnnnnnnnnnnnnnnnnnnnnnnnnnnnnnnnnnnnnnnnnnnnnnnnnnnnnnnnnnnnnnnnnnnnnnnnnnnnnnnnnnnnnnnnnnnnnnnnnnnnnnnnnnnnnnnnnnnnnnnnnnnnnnnnnnnnnnnnnnnnnnnnnnnnnnnnnnnnnnnnnnnnnnnnnnnnnnnnnnnnnnnnnnnnnnnnnnnnnnnnnnnnnnnnnnnnnnnnnnnnnnnnnnnnnnnnnnnnnnnnnnnnnnnnnnnnnnnnnnnnnnnnnnnnnnnnnnnnnnnnnnnnnnnnnnnnnnnnnnnnnnnnnnnnnnnnnnnnnnnnnnnnnnnnnnnnnnnnnnnnnnnnnnnnnnnnnnnnnnnnnnnnnnnnnnnnnnnnnnnnnnnnnnnnnnnnnnnnnnnnnnnnnnnnnnnnnnnnnnnnnnnnnnnnnnnnnnnnnnnnnnnnnnnnnnnnnnnnnnnnnnnnnnnnnnnnnnnnnnnnnnnnnnnnnnnnnnnnnnnnnnnnnnnnnnnnnnnnnnnnnnnnnnnnnnnnnnnnnnnnnnnnnnnnnnnnnnnnnnnnnnnnnnnnnnnnnnnnnnnnnnnnnnnnnnnnnnnnnnnnnnnnnnnnnnnnnnnnnnnnnnnnnnnnnnnnnnnnnnnnnnnnnnnnnnnnnnnnnnnnnnnnnnnnnnnnnnnnnnnnnnnnnnnnnnnnnnnnnnnnnnnnnnnnnnnnnnnnnnnnnnnnnnnnnnnnnnnnnnnnnnnnnnnnnnnnnnnnnnnnnnnnnnnnnnnnnnnnnnnnnnnnnnnnnnnnnnnnnnnnnnnnnnnnnnnnnnnnnnnnnnnnnnnnnnnnnnnnnnnnnnnnnnnnnnnnnnnnnnnnnnnnnnnnnnnnnnnnnnnnnnnnnnnnnnnnnnnnnnnnnnnnnnnnnnnnnnnnnnnnnnnnnnnnnnnnnnnnnnnnnnnnnnnnnnnnnnnnnnnnnnnnnnnnnnnnnnnnnnnnnnnnnnnnnnnnnnnnnnnnnnnnnnnnnnnnnnnnnnnnnnnnnnnnnnnnnnnnnnnnnnnnnnnnnnnnnnnnnnnnnnnnnnnnnnnnnnnnnnnnnnnnnnnnnnnnnnnnnnnnnnnnnnnnnnnnnnnnnnnnnnnnnnnnnnnnnnnnnnnnnnnnnnnnnnnnnnnnnnnnnnnnnnnnnnnnnnnnnnnnnnnnnnnnnnnnnnnnnnnnnnnnnnnnnnnnnnnnnnnnnnnnnnnnnnnnnnnnnnnnnnnnnnnnnnnnnnnnnnnnnnnnnnnnnnnnnnnnnnnnnnnnnnnnnnnnnnnnnnnnnnnnnnnnnnnnnnnnnnnnnnnnnnnnnnnnnnnnnnnnnnnnnnnnnnnnnnnnnnnnnnnnnnnnnnnnnnnnnnnnnnnnnnnnnnnnnnnnnnnnnnnnnnnnnnnnnnnnnnnnnnnnnnnnnnnnnnnnnnnnnnnnnnnnnnnnnnnnnnnnnnnnnnnnnnnnnnnnnnnnnnnnnnnnnnnnnnnnnnnnnnnnnnnnnnnnnnnnnnnnnnnnnnnnnnnnnnnnnnnnnnnnnnnnnnnnnnnnnnnnnnnnnnnnnnnnnnnnnnnnnnnnnnnnnnnnnnnnnnnnnnnnnnnnnnnnnnnnnnnnnnnnnnnnnnnnnnnnnnnnnnnnnnnnnnnnnnnnnnnnnnnnnnnnnnnnnnnnnnnnnnnnnnnnnnnnnnnnnnnnnnnnnnnnnnnnnnnnnnnnnnnnnnnnnnnnnnnnnnnnnnnnnnnnnnnnnnnnnnnnnnnnnnnnnnnnnnnnnnnnnnnnnnnnnnnnnnnnnnnnnnnnnnnnnnnnnnnnnnnnnnnnnnnnnnnnnnnnnnnnnnnnnnnnnnnnnnnnnnnnnnnnnnnnnnnnnnnnnnnnnnnnnnnnnnnnnnnnnnnnnnnnnnnnnnnnnnnnnnnnnnnnnnnnnnnnnnnnnnnnnnnnnnnnnnnnnnnnnnnnnnnnnnnnnnnnnnnnnnnnnnnnnnnnnnnnnnnnnnnnnnnnnnnnnnnnnnnnnnnnnnnnnnnnnnnnnnnnnnnnnnnnnnnnnnnnnnnnnnnnnnnnnnnnnnnnnnnnnnnnnnnnnnnnnnnnnnnnnnnnnnnnnnnnnnnnnnnnnnnnnnnnnnnnnnnnnnnnnnnnnnnnnnnnnnnnnnnnnnnnnnnnnnnnnnnnnnnnnnnnnnnnnnnnnnnnnnnnnnnnnnnnnnnnnnnnnnnnnnnnnnnnnnnnnnnnnnnnnnnnnnnnnnnnnnnnnnnnnnnnnnnnnnnnnnnnnnnnnnnnnnnnnnnnnnnnnnnnnnnnnnnnnnnnnnnnnnnnnnnnnnnnnnnnnnnnnnnnnnnnnnnnnnnnnnnnnnnnnnnnnnnnnnnnnnnnnnnnnnnnnnnnnnnnnnnnnnnnnnnnnnnnnnnnnnnnnnnnnnnnnnnnnnnnnnnnnnnnnnnnnnnnnnnnnnnnnnnnnnnnnnnnnnnnnnnnnnnnnnnnnnnnnnnnnnnnnnnnnnnnnnnnnnnnnnnnnnnnnnnnnnnnnnnnnnnnnnnnnnnnnnnnnnnnnnnnnnnnnnnnnnnnnnnnnnnnnnnnnnnnnnnnnnnnnnnnnnnnnnnnnnnnnnnnnnnnnnnnnnnnnnnnnnnnnnnnnnnnnnnnnnnnnnnnnnnnnnnnnnnnnnnnnnnnnnnnnnnnnnnnnnnnnnnnnnnnnnnnnnnnnnnnnnnnnnnnnnnnnnnnnnnnnnnnnnnnnnnnnnnnnnnnnnnnnnnnnnnnnnnnnnnnnnnnnnnnnnnnnnnnnnnnnnnnnnnnnnnnnnnnnnnnnnnnnnnnnnnnnnnnnnnnnnnnnnnnnnnnnnnnnnnnnnnnnnnnnnnnnnnnnnnnnnnnnnnnnnnnnnnnnnnnnnnnnnnnnnnnnnnnnnnnnnnnnnnnnnnnnnnnnnnnnnnnnnnnnnnnnnnnnnnnnnnnnnnnnnnnnnnnnnnnnnnnnnnnnnnnnnnnnnnnnnnnnnnnnnnnnnnnnnnnnnnnnnnnnnnnnnnnnnnnnnnnnnnnnnnnnnnnnnnnnnnnnnnnnnnnnnnnnnnnnnnnnnnnnnnnnnnnnnnnnnnnnnnnnnnnnnnnnnnnnnnnnnnnnnnnnnnnnnnnnnnnnnnnnnnnnnnnnnnnnnnnnnnnnnnnnnnnnnnnnnnnnnnnnnnnnnnnnnnnnnnnnnnnnnnnnnnnnnnnnnnnnnnnnnnnnnnnnnnnnnnnnnnnnnnnnnnnnnnnnnnnnnnnnnnnnnnnnnnnnnnnnnnnnnnnnnnnnnnnnnnnnnnnnnnnnnnnnnnnnnnnnnnnnnnnnnnnnnnnnnnnnnnnnnnnnnnnnnnnnnnnnnnnnnnnnnnnnnnnnnnnnnnnnnnnnnnnnnnnnnnnnnnnnnnnnnnnnnnnnnnnnnnnnnnnnnnnnnnnnnnnnnnnnnnnnnnnnnnnnnnnnnnnnnnnnnnnnnnnnnnnnnnnnnnnnnnnnnnnnnnnnnnnnnnnnnnnnnnnnnnnnnnnnnnnnnnnnnnnnnnnnnnnnnnnnnnnnnnnnnnnnnnnnnnnnnnnnnnnnnnnnnnnnnnnnnnnnnnnnnnnnnnnnnnnnnnnnnnnnnnnnnnnnnnnnnnnnnnnnnnnnnnnnnnnnnnnnnnnnnnnnnnnnnnnnnnnnnnnnnnnnnnnnnnnnnnnnnnnnnnnnnnnnnnnnnnnnnnnnnnnnnnnnnnnnnnnnnnnnnnnnnnnnnnnnnnnnnnnnnnnnnnnnnnnnnnnnnnnnnnnnnnnnnnnnnnnnnnnnnnnnnnnnnnnnnnnnnnnnnnnnnnnnnnnnnnnnnnnnnnnnnnnnnnnnnnnnnnnnnnnnnnnnnnnnnnnnnnnnnnnnnnnnnnnnnnnnnnnnnnnnnnnnnnnnnnnnnnnnnnnnnnnnnnnnnnnnnnnnnnnnnnnnnnnnnnnnnnnnnnnnnnnnnnnnnnnnnnnnnnnnnnnnnnnnnnnnnnnnnnnnnnnnnnnnnnnnnnnnnnnnnnnnnnnnnnnnnnnnnnnnnnnnnnnnnnnnnnnnnnnnnnnnnnnnnnnnnnnnnnnnnnnnnnnnnnnnnnnnnnnnnnnnnnnnnnnnnnnnnnnnnnnnnnnnnnnnnnnnnnnnnnnnnnnnnnnnnnnnnnnnnnnnnnnnnnnnnnnnnnnnnnnnnnnnnnnnnnnnnnnnnnnnnnnnnnnnnnnnnnnnnnnnnnnnnnnnnnnnnnnnnnnnnnnnnnnnnnnnnnnnnnnnnnnnnnnnnnnnnnnnnnnnnnnnnnnnnnnnnnnnnnnnnnnnnnnnnnnnnnnnnnnnnnnnnnnnnnnnnnnnnnnnnnnnnnnnnnnnnnnnnnnnnnnnnnnnnnnnnnnnnnnnnnnnnnnnnnnnnnnnnnnnnnnnnnnnnnnnnnnnnnnnnnnnnnnnnnnnnnnnnnnnnnnnnnnnnnnnnnnnnnnnnnnnnnnnnnnnnnnnnnnnnnnnnnnnnnnnnnnnnnnnnnnnnnnnnnnnnnnnnnnnnnnnnnnnnnnnnnnnnnnnnnnnnnnnnnnnnnnnnnnnnnnnnnnnnnnnnnnnnnnnnnnnnnnnnnnnnnnnnnnnnnnnnnnnnnnnnnnnnnnnnnnnnnnnnnnnnnnnnnnnnnnnnnnnnnnnnnnnnnnnnnnnnnnnnnnnnnnnnnnnnnnnnnnnnnnnnnnnnnnnnnnnnnnnnnnnnnnnnnnnnnnnnnnnnnnnnnnnnnnnnnnnnnnnnnnnnnnnnnnnnnnnnnnnnnnnnnnnnnnnnnnnnnnnnnnnnnnnnnnnnnnnnnnnnnnnnnnnnnnnnnnnnnnnnnnnnnnnnnnnnnnnnnnnnnnnnnnnnnnnnnnnnnnnnnnnnnnnnnnnnnnnnnnnnnnnnnnnnnnnnnnnnnnnnnnnnnnnnnnnnnnnnnnnnnnnnnnnnnnnnnnnnnnnnnnnnnnnnnnnnnnnnnnnnnnnnnnnnnnnnnnnnnnnnnnnnnnnnnnnnnnnnnnnnnnnnnnnnnnnnnnnnnnnnnnnnnnnnnnnnnnnnnnnnnnnnnnnnnnnnnnnnnnnnnnnnnnnnnnnnnnnnnnnnnnnnnnnnnnnnnnnnnnnnnnnnnnnnnnnnnnnnnnnnnnnnnnnnnnnnnnnnnnnnnnnnnnnnnnnnnnnnnnnnnnnnnnnnnnnnnnnnnnnnnnnnnnnnnnnnnnnnnnnnnnnnnnnnnnnnnnnnnnnnnnnnnnnnnnnnnnnnnnnnnnnnnnnnnnnnnnnnnnnnnnnnnnnnnnnnnnnnnnnnnnnnnnnnnnnnnnnnnnnnnnnnnnnnnnnnnnnnnnnnnnnnnnnnnnnnnnnnnnnnnnnnnnnnnnnnnnnnnnnnnnnnnnnnnnnnnnnnnnnnnnnnnnnnnnnnnnnnnnnnnnnnnnnnnnnnnnnnnnnnnnnnnnnnnnnnnnnnnnnnnnnnnnnnnnnnnnnnnnnnnnnnnnnnnnnnnnnnnnnnnnnnnnnnnnnnnnnnnnnnnnnnnnnnnnnnnnnnnnnnnnnnnnnnnnnnnnnnnnnnnnnnnnnnnnnnnnnnnnnnnnnnnnnnnnnnnnnnnnnnnnnnnnnnnnnnnnnnnnnnnnnnnnnnnnnnnnnnnnnnnnnnnnnnnnnnnnnnnnnnnnnnnnnnnnnnnnnnnnnnnnnnnnnnnnnnnnnnnnnnnnnnnnnnnnnnnnnnnnnnnnnnnnnnnnnnnnnnnnnnnnnnnnnnnnnnnnnnnnnnnnnnnnnnnnnnnnnnnnnnnnnnnnnnnnnnnnnnnnnnnnnnnnnnnnnnnnnnnnnnnnnnnnnnnnnnnnnnnnnnnnnnnnnnnnnnnnnnnnnnnnnnnnnnnnnnnnnnnnnnnnnnnnnnnnnnnnnnnnnnnnnnnnnnnnnnnnnnnnnnnnnnnnnnnnnnnnnnnnnnnnnnnnnnnnnnnnnnnnnnnnnnnnnnnnnnnnnnnnnnnnnnnnnnnnnnnnnnnnnnnnnnnnnnnnnnnnnnnnnnnnnnnnnnnnnnnnnnnnnnnnnnnnnnnnnnnnnnnnnnnnnnnnnnnnnnnnnnnnnnnnnnnnnnnnnnnnnnnnnnnnnnnnnnnnnnnnnnnnnnnnnnnnnnnnnnnnnnnnnnnnnnnnnnnnnnnnnnnnnnnnnnnnnnnnnnnnnnnnnnnnnnnnnnnnnnnnnnnnnnnnnnnnnnnnnnnnnnnnnnnnnnnnnnnnnnnnnnnnnnnnnnnnnnnnnnnnnnnnnnnnnnnnnnnnnnnnnnnnnnnnnnnnnnnnnnnnnnnnnnnnnnnnnnnnnnnnnnnnnnnnnnnnnnnnnnnnnnnnnnnnnnnnnnnnnnnnnnnnnnnnnnnnnnnnnnnnnnnnnnnnnnnnnnnnnnnnnnnnnnnnnnnnnnnnnnnnnnnnnnnnnnnnnnnnnnnnnnnnnnnnnnnnnnnnnnnnnnnnnnnnnnnnnnnnnnnnnnnnnnnnnnnnnnnnnnnnnnnnnnnnnnnnnnnnnnnnnnnnnnnnnnnnnnnnnnnnnnnnnnnnnnnnnnnnnnnnnnnnnnnnnnnnnnnnnnnnnnnnnnnnnnnnnnnnnnnnnnnnnnnnnnnnnnnnnnnnnnnnnnnnnnnnnnnnnnnnnnnnnnnnnnnnnnnnnnnnnnnnnnnnnnnnnnnnnnnnnnnnnnnnnnnnnnnnnnnnnnnnnnnnnnnnnnnnnnnnnnnnnnnnnnnnnnnnnnnnnnnnnnnnnnnnnnnnnnnnnnnnnnnnnnnnnnnnnnnnnnnnnnnnnnnnnnnnnnnnnnnnnnnnnnnnnnnnnnnnnnnnnnnnnnnnnnnnnnnnnnnnnnnnnnnnnnnnnnnnnnnnnnnnnnnnnnnnnnnnnnnnnnnnnnnnnnnnnnnnnnnnnnnnnnnnnnnnnnnnnnnnnnnnnnnnnnnnnnnnnnnnnnnnnnnnnnnnnnnnnnnnnnnnnnnnnnnnnnnnnnnnnnnnnnnnnnnnnnnnnnnnnnnnnnnnnnnnnnnnnnnnnnnnnnnnnnnnnnnnnnnnnnnnnnnnnnnnnnnnnnnnnnnnnnnnnnnnnnnnnnnnnnnnnnnnnnnnnnnnnnnnnnnnnnnnnnnnnnnnnnnnnnnnnnnnnnnnnnnnnnnnnnnnnnnnnnnnnnnnnnnnnnnnnnnnnnnnnnnnnnnnnnnnnnnnnnnnnnnnnnnnnnnnnnnnnnnnnnnnnnnnnnnnnnnnnnnnnnnnnnnnnnnnnnnnnnnnnnnnnnnnnnnnnnnnnnnnnnnnnnnnnnnnnnnnnnnnnnnnnnnnnnnnnnnnnnnnnnnnnnnnnnnnnnnnnnnnnnnnnnnnnnnnnnnnnnnnnnnnnnnnnnnnnnnnnnnnnnnnnnnnnnnnnnnnnnnnnnnnnnnnnnnnnnnnnnnnnnnnnnnnnnnnnnnnnnnnnnnnnnnnnnnnnnnnnnnnnnnnnnnnnnnnnnnnnnnnnnnnnnnnnnnnnnnnnnnnnnnnnnnnnnnnnnnnnnnnnnnnnnnnnnnnnnnnnnnnnnnnnnnnnnnnnnnnnnnnnnnnnnnnnnnnnnnnnnnnnnnnnnnnnnnnnnnnnnnnnnnnnnnnnnnnnnnnnnnnnnnnnnnnnnnnnnnnnnnnnnnnnnnnnnnnnnnnnnnnnnnnnnnnnnnnnnnnnnnnnnnnnnnnnnnnnnnnnnnnnnnnnnnnnnnnnnnnnnnnnnnnnnnnnnnnnnnnnnnnnnnnnnnnnnnnnnnnnnnnnnnnnnnnnnnnnnnnnnnnnnnnnnnnnnnnnnnnnnnnnnnnnnnnnnnnnnnnnnnnnnnnnnnnnnnnnnnnnnnnnnnnnnnnnnnnnnnnnnnnnnnnnnnnnnnnnnnnnnnnnnnnnnnnnnnnnnnnnnnnnnnnnnnnnnnnnnnnnnnnnnnnnnnnnnnnnnnnnnnnnnnnnnnnnnnnnnnnnnnnnnnnnnnnnnnnnnnnnnnnnnnnnnnnnnnnnnnnnnnnnnnnnnnnnnnnnnnnnnnnnnnnnnnnnnnnnnnnnnnnnnnnnnnnnnnnnnnnnnnnnnnnnnnnnnnnnnnnnnnnnnnnnnnnnnnnnnnnnnnnnnnnnnnnnnnnnnnnnnnnnnnnnnnnnnnnnnnnnnnnnnnnnnnnnnnnnnnnnnnnnnnnnnnnnnnnnnnnnnnnnnnnnnnnnnnnnnnnnnnnnnnnnnnnnnnnnnnnnnnnnnnnnnnnnnnnnnnnnnnnnnnnnnnnnnnnnnnnnnnnnnnnnnnnnnnnnnnnnnnnnnnnnnnnnnnnnnnnnnnnnnnnnnnnnnnnnnnnnnnnnnnnnnnnnnnnnnnnnnnnnnnnnnnnnnnnnnnnnnnnnnnnnnnnnnnnnnnnnnnnnnnnnnnnnnnnnnnnnnnnnnnnnnnnnnnnnnnnnnnnnnnnnnnnnnnnnnnnnnnnnnnnnnnnnnnnnnnnnnnnnnnnnnnnnnnnnnnnnnnnnnnnnnnnnnnnnnnnnnnnnnnnnnnnnnnnnnnnnnnnnnnnnnnnnnnnnnnnnnnnnnnnnnnnnnnnnnnnnnnnnnnnnnnnnnnnnnnnnnnnnnnnnnnnnnnnnnnnnnnnnnnnnnnnnnnnnnnnnnnnnnnnnnnnnnnnnnnnnnnnnnnnnnnnnnnnnnnnnnnnnnnnnnnnnnnnnnnnnnnnnnnnnnnnnnnnnnnnnnnnnnnnnnnnnnnnnnnnnnnnnnnnnnnnnnnnnnnnnnnnnnnnnnnnnnnnnnnnnnnnnnnnnnnnnnnnnnnnnnnnnnnnnnnnnnnnnnnnnnnnnnnnnnnnnnnnnnnnnnnnnnnnnnnnnnnnnnnnnnnnnnnnnnnnnnnnnnnnnnnnnnnnnnnnnnnnnnnnnnnnnnnnnnnnnnnnnnnnnnnnnnnnnnnnnnnnnnnnnnnnnnnnnnnnnnnnnnnnnnnnnnnnnnnnnnnnnnnnnnnnnnnnnnnnnnnnnnnnnnnnnnnnnnnnnnnnnnnnnnnnnnnnnnnnnnnnnnnnnnnnnnnnnnnnnnnnnnnnnnnnnnnnnnnnnnnnnnnnnnnnnnnnnnnnnnnnnnnnnnnnnnnnnnnnnnnnnnnnnnnnnnnnnnnnnnnnnnnnnnnnnnnnnnnnnnnnnnnnnnnnnnnnnnnnnnnnnnnnnnnnnnnnnnnnnnnnnnnnnnnnnnnnnnnnnnnnnnnnnnnnnnnnnnnnnnnnnnnnnnnnnnnnnnnnnnnnnnnnnnnnnnnnnnnnnnnnnnnnnnnnnnnnnnnnnnnnnnnnnnnnnnnnnnnnnnnnnnnnnnnnnnnnnnnnnnnnnnnnnnnnnnnnnnnnnnnnnnnnnnnnnnnnnnnnnnnnnnnnnnnnnnnnnnnnnnnnnnnnnnnnnnnnnnnnnnnnnnnnnnnnnnnnnnnnnnnnnnnnnnnnnnnnnnnnnnnnnnnnnnnnnnnnnnnnnnnnnnnnnnnnnnnnnnnnnnnnnnnnnnnnnnnnnnnnnnnnnnnnnnnnnnnnnnnnnnnnnnnnnnnnnnnnnnnnnnnnnnnnnnnnnnnnnnnnnnnnnnnnnnnnnnnnnnnnnnnnnnnnnnnnnnnnnnnnnnnnnnnnnnnnnnnnnnnnnnnnnnnnnnnnnnnnnnnnnnnnnnnnnnnnnnnnnnnnnnnnnnnnnnnnnnnnnnnnnnnnnnnnnnnnnnnnnnnnnnnnnnnnnnnnnnnnnnnnnnnnnnnnnnnnnnnnnnnnnnnnnnnnnnnnnnnnnnnnnnnnnnnnnnnnnnnnnnnnnnnnnnnnnnnnnnnnnnnnnnnnnnnnnnnnnnnnnnnnnnnnnnnnnnnnnnnnnnnnnnnnnnnnnnnnnnnnnnnnnnnnnnnnnnnnnnnnnnnnnnnnnnnnnnnnnnnnnnnnnnnnnnnnnnnnnnnnnnnnnnnnnnnnnnnnnnnnnnnnnnnnnnnnnnnnnnnnnnnnnnnnnnnnnnnnnnnnnnnnnnnnnnnnnnnnnnnnnnnnnnnnnnnnnnnnnnnnnnnnnnnnnnnnnnnnnnnnnnnnnnnnnnnnnnnnnnnnnnnnnnnnnnnnnnnnnnnnnnnnnnnnnnnnnnnnnnnnnnnnnnnnnnnnnnnnnnnnnnnnnnnnnnnnnnnnnnnnnnnnnnnnnnnnnnnnnnnnnnnnnnnnnnnnnnnnnnnnnnnnnnnnnnnnnnnnnnnnnnnnnnnnnnnnnnnnnnnnnnnnnnnnnnnnnnnnnnnnnnnnnnnnnnnnnnnnnnnnnnnnnnnnnnnnnnnnnnnnnnnnnnnnnnnnnnnnnnnnnnnnnnnnnnnnnnnnnnnnnnnnnnnnnnnnnnnnnnnnnnnnnnnnnnnnnnnnnnnnnnnnnnnnnnnnnnnnnnnnnnnnnnnnnnnnnnnnnnnnnnnnnnnnnnnnnnnnnnnnnnnnnnnnnnnnnnnnnnnnnnnnnnnnnnnnnnnnnnnnnnnnnnnnnnnnnnnnnnnnnnnnnnnnnnnnnnnnnnnnnnnnnnnnnnnnnnnnnnnnnnnnnnnnnnnnnnnnnnnnnnnnnnnnnnnnnnnnnnnnnnnnnnnnnnnnnnnnnnnnnnnnnnnnnnnnnnnnnnnnnnnnnnnnnnnnnnnnnnnnnnnnnnnnnnnnnnnnnnnnnnnnnnnnnnnnnnnnnnnnnnnnnnnnnnnnnnnnnnnnnnnnnnnnnnnnnnnnnnnnnnnnnnnnnnnnnnnnnnnnnnnnnnnnnnnnnnnnnnnnnnnnnnnnnnnnnnnnnnnnnnnnnnnnnnnnnnnnnnnnnnnnnnnnnnnnnnnnnnnnnnnnnnnnnnnnnnnnnnnnnnnnnnnnnnnnnnnnnnnnnnnnnnnnnnnnnnnnnnnnnnnnnnnnnnnnnnnnnnnnnnnnnnnnnnnnnnnnnnnnnnnnnnnnnnnnnnnnnnnnnnnnnnnnnnnnnnnnnnnnnnnnnnnnnnnnnnnnnnnnnnnnnnnnnnnnnnnnnnnnnnnnnnnnnnnnnnnnnnnnnnnnnnnnnnnnnnnnnnnnnnnnnnnnnnnnnnnnnnnnnnnnnnnnnnnnnnnnnnnnnnnnnnnnnnnnnnnnnnnnnnnnnnnnnnnnnnnnnnnnnnnnnnnnnnnnnnnnnnnnnnnnnnnnnnnnnnnnnnnnnnnnnnnnnnnnnnnnnnnnnnnnnnnnnnnnnnnnnnnnnnnnnnnnnnnnnnnnnnnnnnnnnnnnnnnnnnnnnnnnnnnnnnnnnnnnnnnnnnnnnnnnnnnnnnnnnnnnnnnnnnnnnnnnnnnnnnnnnnnnnnnnnnnnnnnnnnnnnnnnnnnnnnnnnnnnnnnnnnnnnnnnnnnnnnnnnnnnnnnnnnnnnnnnnnnnnnnnnnnnnnnnnnnnnnnnnnnnnnnnnnnnnnnnnnnnnnnnnnnnnnnnnnnnnnnnnnnnnnnnnnnnnnnnnnnnnnnnnnnnnnnnnnnnnnnnnnnnnnnnnnnnnnnnnnnnnnnnnnnnnnnnnnnnnnnnnnnnnnnnnnnnnnnnnnnnnnnnnnnnnnnnnnnnnnnnnnnnnnnnnnnnnnnnnnnnnnnnnnnnnnnnnnnnnnnnnnnnnnnnnnnnnnnnnnnnnnnnnnnnnnnnnnnnnnnnnnnnnnnnnnnnnnnnnnnnnnnnnnnnnnnnnnnnnnnnnnnnnnnnnnnnnnnnnnnnnnnnnnnnnnnnnnnnnnnnnnnnnnnnnnnnnnnnnnnnnnnnnnnnnnnnnnnnnnnnnnnnnnnnnnnnnnnnnnnnnnnnnnnnnnnnnnnnnnnnnnnnnnnnnnnnnnnnnnnnnnnnnnnnnnnnnnnnnnnnnnnnnnnnnnnnnnnnnnnnnnnnnnnnnnnnnnnnnnnnnnnnnnnnnnnnnnnnnnnnnnnnnnnnnnnnnnnnnnnnnnnnnnnnnnnnnnnnnnnnnnnnnnnnnnnnnnnnnnnnnnnnnnnnnnnnnnnnnnnnnnnnnnnnnnnnnnnnnnnnnnnnnnnnnnnnnnnnnnnnnnnnnnnnnnnnnnnnnnnnnnnnnnnnnnnnnnnnnnnnnnnnnnnnnnnnnnnnnnnnnnnnnnnnnnnnnnnnnnnnnnnnnnnnnnnnnnnnnnnnnnnnnnnnnnnnnnnnnnnnnnnnnnnnnnnnnnnnnnnnnnnnnnnnnnnnnnnnnnnnnnnnnnnnnnnnnnnnnnnnnnnnnnnnnnnnnnnnnnnnnnnnnnnnnnnnnnnnnnnnnnnnnnnnnnnnnnnnnnnnnnnnnnnnnnnnnnnnnnnnnnnnnnnnnnnnnnnnnnnnnnnnnnnnnnnnnnnnnnnnnnnnnnnnnnnnnnnnnnnnnnnnnnnnnnnnnnnnnnnnnnnnnnnnnnnnnnnnnnnnnnnnnnnnnnnnnnnnnnnnnnnnnnnnnnnnnnnnnnnnnnnnnnnnnnnnnnnnnnnnnnnnnnnnnnnnnnnnnnnnnnnnnnnnnnnnnnnnnnnnnnnnnnnnnnnnnnnnnnnnnnnnnnnnnnnnnnnnnnnnnnnnnnnnnnnnnnnnnnnnnnnnnnnnnnnnnnnnnnnnnnnnnnnnnnnnnnnnnnnnnnnnnnnnnnnnnnnnnnnnnnnnnnnnnnnnnnnnnnnnnnnnnnnnnnnnnnnnnnnnnnnnnnnnnnnnnnnnnnnnnnnnnnnnnnnnnnnnnnnnnnnnnnnnnnnnnnnnnnnnnnnnnnnnnnnnnnnnnnnnnnnnnnnnnnnnnnnnnnnnnnnnnnnnnnnnnnnnnnnnnnnnnnnnnnnnnnnnnnnnnnnnnnnnnnnnnnnnnnnnnnnnnnnnnnnnnnnnnnnnnnnnnnnnnnnnnnnnnnnnnnnnnnnnnnnnnnnnnnnnnnnnnnnnnnnnnnnnnnnnnnnnnnnnnnnnnnnnnnnnnnnnnnnnnnnnnnnnnnnnnnnnnnnnnnnnnnnnnnnnnnnnnnnnnnnnnnnnnnnnnnnnnnnnnnnnnnnnnnnnnnnnnnnnnnnnnnnnnnnnnnnnnnnnnnnnnnnnnnnnnnnnnnnnnnnnnnnnnnnnnnnnnnnnnnnnnnnnnnnnnnnnnnnnnnnnnnnnnnnnnnnnnnnnnnnnnnnnnnnnnnnnnnnnnnnnnnnnnnnnnnnnnnnnnnnnnnnnnnnnnnnnnnnnnnnnnnnnnnnnnnnnnnnnnnnnnnnnnnnnnnnnnnnnnnnnnnnnnnnnnnnnnnnnnnnnnnnnnnnnnnnnnnnnnnnnnnnnnnnnnnnnnnnnnnnnnnnnnnnnnnnnnnnnnnnnnnnnnnnnnnnnnnnnnnnnnnnnnnnnnnnnnnnnnnnnnnnnnnnnnnnnnnnnnnnnnnnnnnnnnnnnnnnnnnnnnnnnnnnnnnnnnnnnnnnnnnnnnnnnnnnnnnnnnnnnnnnnnnnnnnnnnnnnnnnnnnnnnnnnnnnnnnnnnnnnnnnnnnnnnnnnnnnnnnnnnnnnnnnnnnnnnnnnnnnnnnnnnnnnnnnnnnnnnnnnnnnnnnnnnnnnnnnnnnnnnnnnnnnnnnnnnnnnnnnnnnnnnnnnnnnnnnnnnnnnnnnnnnnnnnnnnnnnnnnnnnnnnnnnnnnnnnnnnnnnnnnnnnnnnnnnnnnnnnnnnnnnnnnnnnnnnnnnnnnnnnnnnnnnnnnnnnnnnnnnnnnnnnnnnnnnnnnnnnnnnnnnnnnnnnnnnnnnnnnnnnnnnnnnnnnnnnnnnnnnnnnnnnnnnnnnnnnnnnnnnnnnnnnnnnnnnnnnnnnnnnnnnnnnnnnnnnnnnnnnnnnnnnnnnnnnnnnnnnnnnnnnnnnnnnnnnnnnnnnnnnnnnnnnnnnnnnnnnnnnnnnnnnnnnnnnnnnnnnnnnnnnnnnnnnnnnnnnnnnnnnnnnnnnnnnnnnnnnnnnnnnnnnnnnnnnnnnnnnnnnnnnnnnnnnnnnnnnnnnnnnnnnnnnnnnnnnnnnnnnnnnnnnnnnnnnnnnnnnnnnnnnnnnnnnnnnnnnnnnnnnnnnnnnnnnnnnnnnnnnnnnnnnnnnnnnnnnnnnnnnnnnnnnnnnnnnnnnnnnnnnnnnnnnnnnnnnnnnnnnnnnnnnnnnnnnnnnnnnnnnnnnnnnnnnnnnnnnnnnnnnnnnnnnnnnnnnnnnnnnnnnnnnnnnnnnnnnnnnnnnnnnnnnnnnnnnnnnnnnnnnnnnnnnnnnnnnnnnnnnnnnnnnnnnnnnnnnnnnnnnnnnnnnnnnnnnnnnnnnnnnnnnnnnnnnnnnnnnnnnnnnnnnnnnnnnnnnnnnnnnnnnnnnnnnnnnnnnnnnnnnnnnnnnnnnnnnnnnnnnnnnnnnnnnnnnnnnnnnnnnnnnnnnnnnnnnnnnnnnnnnnnnnnnnnnnnnnnnnnnnnnnnnnnnnnnnnnnnnnnnnnnnnnnnnnnnnnnnnnnnnnnnnnnnnnnnnnnnnnnnnnnnnnnnnnnnnnnnnnnnnnnnnnnnnnnnnnnnnnnnnnnnnnnnnnnnnnnnnnnnnnnnnnnnnnnnnnnnnnnnnnnnnnnnnnnnnnnnnnnnnnnnnnnnnnnnnnnnnnnnnnnnnnnnnnnnnnnnnnnnnnnnnnnnnnnnnnnnnnnnnnnnnnnnnnnnnnnnnnnnnnnnnnnnnnnnnnnnnnnnnnnnnnnnnnnnnnnnnnnnnnnnnnnnnnnnnnnnnnnnnnnnnnnnnnnnnnnnnnnnnnnnnnnnnnnnnnnnnnnnnnnnnnnnnnnnnnnnnnnnnnnnnnnnnnnnnnnnnnnnnnnnnnnnnnnnnnnnnnnnnnnnnnnnnnnnnnnnnnnnnnnnnnnnnnnnnnnnnnnnnnnnnnnnnnnnnnnnnnnnnnnnnnnnnnnnnnnnnnnnnnnnnnnnnnnnnnnnnnnnnnnnnnnnnnnnnnnnnnnnnnnnnnnnnnnnnnnnnnnnnnnnnnnnnnnnnnnnnnnnnnnnnnnnnnnnnnnnnnnnnnnnnnnnnnnnnnnnnnnnnnnnnnnnnnnnnnnnnnnnnnnnnnnnnnnnnnnnnnnnnnnnnnnnnnnnnnnnnnnnnnnnnnnnnnnnnnnnnnnnnnnnnnnnnnnnnnnnnnnnnnnnnnnnnnnnnnnnnnnnnnnnnnnnnnnnnnnnnnnnnnnnnnnnnnnnnnnnnnnnnnnnnnnnnnnnnnnnnnnnnnnnnnnnnnnnnnnnnnnnnnnnnnnnnnnnnnnnnnnnnnnnnnnnnnnnnnnnnnnnnnnnnnnnnnnnnnnnnnnnnnnnnnnnnnnnnnnnnnnnnnnnnnnnnnnnnnnnnnnnnnnnnnnnnnnnnnnnnnnnnnnnnnnnnnnnnnnnnnnnnnnnnnnnnnnnnnnnnnnnnnnnnnnnnnnnnnnnnnnnnnnnnnnnnnnnnnnnnnnnnnnnnnnnnnnnnnnnnnnnnnnnnnnnnnnnnnnnnnnnnnnnnnnnnnnnnnnnnnnnnnnnnnnnnnnnnnnnnnnnnnnnnnnnnnnnnnnnnnnnnnnnnnnnnnnnnnnnnnnnnnnnnnnnnnnnnnnnnnnnnnnnnnnnnnnnnnnnnnnnnnnnnnnnnnnnnnnnnnnnnnnnnnnnnnnnnnnnnnnnnnnnnnnnnnnnnnnnnnnnnnnnnnnnnnnnnnnnnnnnnnnnnnnnnnnnnnnnnnnnnnnnnnnnnnnnnnnnnnnnnnnnnnnnnnnnnnnnnnnnnnnnnnnnnnnnnnnnnnnnnnnnnnnnnnnnnnnnnnnnnnnnnnnnnnnnnnnnnnnnnnnnnnnnnnnnnnnnnnnnnnnnnnnnnnnnnnnnnnnnnnnnnnnnnnnnnnnnnnnnnnnnnnnnnnnnnnnnnnnnnnnnnnnnnnnnnnnnnnnnnnnnnnnnnnnnnnnnnnnnnnnnnnnnnnnnnnnnnnnnnnnnnnnnnnnnnnnnnnnnnnnnnnnnnnnnnnnnnnnnnnnnnnnnnnnnnnnnnnnnnnnnnnnnnnnnnnnnnnnnnnnnnnnnnnnnnnnnnnnnnnnnnnnnnnnnnnnnnnnnnnnnnnnnnnnnnnnnnnnnnnnnnnnnnnnnnnnnnnnnnnnnnnnnnnnnnnnnnnnnnnnnnnnnnnnnnnnnnnnnnnnnnnnnnnnnnnnnnnnnnnnnnnnnnnnnnnnnnnnnnnnnnnnnnnnnnnnnnnnnnnnnnnnnnnnnnnnnnnnnnnnnnnnnnnnnnnnnnnnnnnnnnnnnnnnnnnnnnnnnnnnnnnnnnnnnnnnnnnnnnnnnnnnnnnnnnnnnnnnnnnnnnnnnnnnnnnnnnnnnnnnnnnnnnnnnnnnnnnnnnnnnnnnnnnnnnnnnnnnnnnnnnnnnnnnnnnnnnnnnnnnnnnnnnnnnnnnnnnnnnnnnnnnnnnnnnnnnnnnnnnnnnnnnnnnnnnnnnnnnnnnnnnnnnnnnnnnnnnnnnnnnnnnnnnnnnnnnnnnnnnnnnnnnnnnnnnnnnnnnnnnnnnnnnnnnnnnnnnnnnnnnnnnnnnnnnnnnnnnnnnnnnnnnnnnnnnnnnnnnnnnnnnnnnnnnnnnnnnnnnnnnnnnnnnnnnnnnnnnnnnnnnnnnnnnnnnnnnnnnnnnnnnnnnnnnnnnnnnnnnnnnnnnnnnnnnnnnnnnnnnnnnnnnnnnnnnnnnnnnnnnnnnnnnnnnnnnnnnnnnnnnnnnnnnnnnnnnnnnnnnnnnnnnnnnnnnnnnnnnnnnnnnnnnnnnnnnnnnnnnnnnnnnnnnnnnnnnnnnnnnnnnnnnnnnnnnnnnnnnnnnnnnnnnnnnnnnnnnnnnnnnnnnnnnnnnnnnnnnnnnnnnnnnnnnnnnnnnnnnnnnnnnnnnnnnnnnnnnnnnnnnnnnnnnnnnnnnnnnnnnnnnnnnnnnnnnnnnnnnnnnnnnnnnnnnnnnnnnnnnnnnnnnnnnnnnnnnnnnnnnnnnnnnnnnnnnnnnnnnnnnnnnnnnnnnnnnnnnnnnnnnnnnnnnnnnnnnnnnnnnnnnnnnnnnnnnnnnnnnnnnnnnnnnnnnnnnnnnnnnnnnnnnnnnnnnnnnnnnnnnnnnnnnnnnnnnnnnnnnnnnnnnnnnnnnnnnnnnnnnnnnnnnnnnnnnnnnnnnnnnnnnnnnnnnnnnnnnnnnnnnnnnnnnnnnnnnnnnnnnnnnnnnnnnnnnnnnnnnnnnnnnnnnnnnnnnnnnnnnnnnnnnnnnnnnnnnnnnnnnnnnnnnnnnnnnnnnnnnnnnnnnnnnnnnnnnnnnnnnnnnnnnnnnnnnnnnnnnnnnnnnnnnnnnnnnnnnnnnnnnnnnnnnnnnnnnnnnnnnnnnnnnnnnnnnnnnnnnnnnnnnnnnnnnnnnnnnnnnnnnnnnnnnnnnnnnnnnnnnnnnnnnnnnnnnnnnnnnnnnnnnnnnnnnnnnnnnnnnnnnnnnnnnnnnnnnnnnnnnnnnnnnnnnnnnnnnnnnnnnnnnnnnnnnnnnnnnnnnnnnnnnnnnnnnnnnnnnnnnnnnnnnnnnnnnnnnnnnnnnnnnnnnnnnnnnnnnnnnnnnnnnnnnnnnnnnnnnnnnnnnnnnnnnnnnnnnnnnnnnnnnnnnnnnnnnnnnnnnnnnnnnnnnnnnnnnnnnnnnnnnnnnnnnnnnnnnnnnnnnnnnnnnnnnnnnnnnnnnnnnnnnnnnnnnnnnnnnnnnnnnnnnnnnnnnnnnnnnnnnnnnnnnnnnnnnnnnnnnnnnnnnnnnnnnnnnnnnnnnnnnnnnnnnnnnnnnnnnnnnnnnnnnnnnnnnnnnnnnnnnnnnnnnnnnnnnnnnnnnnnnnnnnnnnnnnnnnnnnnnnnnnnnnnnnnnnnnnnnnnnnnnnnnnnnnnnnnnnnnnnnnnnnnnnnnnnnnnnnnnnnnnnnnnnnnnnnnnnnnnnnnnnnnnnnnnnnnnnnnnnnnnnnnnnnnnnnnnnnnnnnnnnnnnnnnnnnnnnnnnnnnnnnnnnnnnnnnnnnnnnnnnnnnnnnnnnnnnnnnnnnnnnnnnnnnnnnnnnnnnnnnnnnnnnnnnnnnnnnnnnnnnnnnnnnnnnnnnnnnnnnnnnnnnnnnnnnnnnnnnnnnnnnnnnnnnnnnnnnnnnnnnnnnnnnnnnnnnnnnnnnnnnnnnnnnnnnnnnnnnnnnnnnnnnnnnnnnnnnnnnnnnnnnnnnnnnnnnnnnnnnnnnnnnnnnnnnnnnnnnnnnnnnnnnnnnnnnnnnnnnnnnnnnnnnnnnnnnnnnnnnnnnnnnnnnnnnnnnnnnnnnnnnnnnnnnnnnnnnnnnnnnnnnnnnnnnnnnnnnnnnnnnnnnnnnnnnnnnnnnnnnnnnnnnnnnnnnnnnnnnnnnnnnnnnnnnnnnnnnnnnnnnnnnnnnnnnnnnnnnnnnnnnnnnnnnnnnnnnnnnnnnnnnnnnnnnnnnnnnnnnnnnnnnnnnnnnnnnnnnnnnnnnnnnnnnnnnnnnnnnnnnnnnnnnnnnnnnnnnnnnnnnnnnnnnnnnnnnnnnnnnnnnnnnnnnnnnnnnnnnnnnnnnnnnnnnnnnnnnnnnnnnnnnnnnnnnnnnnnnnnnnnnnnnnnnnnnnnnnnnnnnnnnnnnnnnnnnnnnnnnnnnnnnnnnnnnnnnnnnnnnnnnnnnnnnnnnnnnnnnnnnnnnnnnnnnnnnnnnnnnnnnnnnnnnnnnnnnnnnnnnnnnnnnnnnnnnnnnnnnnnnnnnnnnnnnnnnnnnnnnnnnnnnnnnnnnnnnnnnnnnnnnnnnnnnnnnnnnnnnnnnnnnnnnnnnnnnnnnnnnnnnnnnnnnnnnnnnnnnnnnnnnnnnnnnnnnnnnnnnnnnnnnnnnnnnnnnnnnnnnnnnnnnnnnnnnnnnnnnnnnnnnnnnnnnnnnnnnnnnnnnnnnnnnnnnnnnnnnnnnnnnnnnnnnnnnnnnnnnnnnnnnnnnnnnnnnnnnnnnnnnnnnnnnnnnnnnnnnnnnnnnnnnnnnnnnnnnnnnnnnnnnnnnnnnnnnnnnnnnnnnnnnnnnnnnnnnnnnnnnnnnnnnnnnnnnnnnnnnnnnnnnnnnnnnnnnnnnnnnnnnnnnnnnnnnnnnnnnnnnnnnnnnnnnnnnnnnnnnnnnnnnnnnnnnnnnnnnnnnnnnnnnnnnnnnnnnnnnnnnnnnnnnnnnnnnnnnnnnnnnnnnnnnnnnnnnnnnnnnnnnnnnnnnnnnnnnnnnnnnnnnnnnnnnnnnnnnnnnnnnnnnnnnnnnnnnnnnnnnnnnnnnnnnnnnnnnnnnnnnnnnnnnnnnnnnnnnnnnnnnnnnnnnnnnnnnnnnnnnnnnnnnnnnnnnnnnnnnnnnnnnnnnnnnnnnnnnnnnnnnnnnnnnnnnnnnnnnnnnnnnnnnnnnnnnnnnnnnnnnnnnnnnnnnnnnnnnnnnnnnnnnnnnnnnnnnnnnnnnnnnnnnnnnnnnnnnnnnnnnnnnnnnnnnnnnnnnnnnnnnnnnnnnnnnnnnnnnnnnnnnnnnnnnnnnnnnnnnnnnnnnnnnnnnnnnnnnnnnnnnnnnnnnnnnnnnnnnnnnnnnnnnnnnnnnnnnnnnnnnnnnnnnnnnnnnnnnnnnnnnnnnnnnnnnnnnnnnnnnnnnnnnnnnnnnnnnnnnnnnnnnnnnnnnnnnnnnnnnnnnnnnnnnnnnnnnnnnnnnnnnnnnnnnnnnnnnnnnnnnnnnnnnnnnnnnnnnnnnnnnnnnnnnnnnnnnnnnnnnnnnnnnnnnnnnnnnnnnnnnnnnnnnnnnnnnnnnnnnnnnnnnnnnnnnnnnnnnnnnnnnnnnnnnnnnnnnnnnnnnnnnnnnnnnnnnnnnnnnnnnnnnnnnnnnnnnnnnnnnnnnnnnnnnnnnnnnnnnnnnnnnnnnnnnnnnnnnnnnnnnnnnnnnnnnnnnnnnnnnnnnnnnnnnnnnnnnnnnnnnnnnnnnnnnnnnnnnnnnnnnnnnnnnnnnnnnnnnnnnnnnnnnnnnnnnnnnnnnnnnnnnnnnnnnnnnnnnnnnnnnnnnnnnnnnnnnnnnnnnnnnnnnnnnnnnnnnnnnnnnnnnnnnnnnnnnnnnnnnnnnnnnnnnnnnnnnnnnnnnnnnnnnnnnnnnnnnnnnnnnnnnnnnnnnnnnnnnnnnnnnnnnnnnnnnnnnnnnnnnnnnnnnnnnnnnnnnnnnnnnnnnnnnnnnnnnnnnnnnnnnnnnnnnnnnnnnnnnnnnnnnnnnnnnnnnnnnnnnnnnnnnnnnnnnnnnnnnnnnnnnnnnnnnnnnnnnnnnnnnnnnnnnnnnnnnnnnnnnnnnnnnnnnnnnnnnnnnnnnnnnnnnnnnnnnnnnnnnnnnnnnnnnnnnnnnnnnnnnnnnnnnnnnnnnnnnnnnnnnnnnnnnnnnnnnnnnnnnnnnnnnnnnnnnnnnnnnnnnnnnnnnnnnnnnnnnnnnnnnnnnnnnnnnnnnnnnnnnnnnnnnnnnnnnnnnnnnnnnnnnnnnnnnnnnnnnnnnnnnnnnnnnnnnnnnnnnnnnnnnnnnnnnnnnnnnnnnnnnnnnnnnnnnnnnnnnnnnnnnnnnnnnnnnnnnnnnnnnnnnnnnnnnnnnnnnnnnnnnnnnnnnnnnnnnnnnnnnnnnnnnnnnnnnnnnnnnnnnnnnnnnnnnnnnnnnnnnnnnnnnnnnnnnnnnnnnnnnnnnnnnnnnnnnnnnnnnnnnnnnnnnnnnnnnnnnnnnnnnnnnnnnnnnnnnnnnnnnnnnnnnnnnnnnnnnnnnnnnnnnnnnnnnnnnnnnnnnnnnnnnnnnnnnnnnnnnnnnnnnnnnnnnnnnnnnnnnnnnnnnnnnnnnnnnnnnnnnnnnnnnnnnnnnnnnnnnnnnnnnnnnnnnnnnnnnnnnnnnnnnnnnnnnnnnnnnnnnnnnnnnnnnnnnnnnnnnnnnnnnnnnnnnnnnnnnnnnnnnnnnnnnnnnnnnnnnnnnnnnnnnnnnnnnnnnnnnnnnnnnnnnnnnnnnnnnnnnnnnnnnnnnnnnnnnnnnnnnnnnnnnnnnnnnnnnnnnnnnnnnnnnnnnnnnnnnnnnnnnnnnnnnnnnnnnnnnnnnnnnnnnnnnnnnnnnnnnnnnnnnnnnnnnnnnnnnnnnnnnnnnnnnnnnnnnnnnnnnnnnnnnnnnnnnnnnnnnnnnnnnnnnnnnnnnnnnnnnnnnnnnnnnnnnnnnnnnnnnnnnnnnnnnnnnnnnnnnnnnnnnnnnnnnnnnnnnnnnnnnnnnnnnnnnnnnnnnnnnnnnnnnnnnnnnnnnnnnnnnnnnnnnnnnnnnnnnnnnnnnnnnnnnnnnnnnnnnnnnnnnnnnnnnnnnnnnnnnnnnnnnnnnnnnnnnnnnnnnnnnnnnnnnnnnnnnnnnnnnnnnnnnnnnnnnnnnnnnnnnnnnnnnnnnnnnnnnnnnnnnnnnnnnnnnnnnnnnnnnnnnnnnnnnnnnnnnnnnnnnnnnnnnnnnnnnnnnnnnnnnnnnnnnnnnnnnnnnnnnnnnnnnnnnnnnnnnnnnnnnnnnnnnnnnnnnnnnnnnnnnnnnnnnnnnnnnnnnnnnnnnnnnnnnnnnnnnnnnnnnnnnnnnnnnnnnnnnnnnnnnnnnnnnnnnnnnnnnnnnnnnnnnnnnnnnnnnnnnnnnnnnnnnnnnnnnnnnnnnnnnnnnnnnnnnnnnnnnnnnnnnnnnnnnnnnnnnnnnnnnnnnnnnnnnnnnnnnnnnnnnnnnnnnnnnnnnnnnnnnnnnnnnnnnnnnnnnnnnnnnnnnnnnnnnnnnnnnnnnnnnnnnnnnnnnnnnnnnnnnnnnnnnnnnnnnnnnnnnnnnnnnnnnnnnnnnnnnnnnnnnnnnnnnnnnnnnnnnnnnnnnnnnnnnnnnnnnnnnnnnnnnnnnnnnnnnnnnnnnnnnnnnnnnnnnnnnnnnnnnnnnnnnnnnnnnnnnnnnnnnnnnnnnnnnnnnnnnnnnnnnnnnnnnnnnnnnnnnnnnnnnnnnnnnnnnnnnnnnnnnnnnnnnnnnnnnnnnnnnnnnnnnnnnnnnnnnnnnnnnnnnnnnnnnnnnnnnnnnnnnnnnnnnnnnnnnnnnnnnnnnnnnnnnnnnnnnnnnnnnnnnnnnnnnnnnnnnnnnnnnnnnnnnnnnnnnnnnnnnnnnnnnnnnnnnnnnnnnnnnnnnnnnnnnnnnnnnnnnnnnnnnnnnnnnnnnnnnnnnnnnnnnnnnnnnnnnnnnnnnnnnnnnnnnnnnnnnnnnnnnnnnnnnnnnnnnnnnnnnnnnnnnnnnnnnnnnnnnnnnnnnnnnnnnnnnnnnnnnnnnnnnnnnnnnnnnnnnnnnnnnnnnnnnnnnnnnnnnnnnnnnnnnnnnnnnnnnnnnnnnnnnnnnnnnnnnnnnnnnnnnnnnnnnnnnnnnnnnnnnnnnnnnnnnnnnnnnnnnnnnnnnnnnnnnnnnnnnnnnnnnnnnnnnnnnnnnnnnnnnnnnnnnnnnnnnnnnnnnnnnnnnnnnnnnnnnnnnnnnnnnnnnnnnnnnnnnnnnnnnnnnnnnnnnnnnnnnnnnnnnnnnnnnnnnnnnnnnnnnnnnnnnnnnnnnnnnnnnnnnnnnnnnnnnnnnnnnnnnnnnnnnnnnnnnnnnnnnnnnnnnnnnnnnnnnnnnnnnnnnnnnnnnnnnnnnnnnnnnnnnnnnnnnnnnnnnnnnnnnnnnnnnnnnnnnnnnnnnnnnnnnnnnnnnnnnnnnnnnnnnnnnnnnnnnnnnnnnnnnnnnnnnnnnnnnnnnnnnnnnnnnnnnnnnnnnnnnnnnnnnnnnnnnnnnnnnnnnnnnnnnnnnnnnnnnnnnnnnnnnnnnnnnnnnnnnnnnnnnnnnnnnnnnnnnnnnnnnnnnnnnnnnnnnnnnnnnnnnnnnnnnnnnnnnnnnnnnnnnnnnnnnnnnnnnnnnnnnnnnnnnnnnnnnnnnnnnnnnnnnnnnnnnnnnnnnnnnnnnnnnnnnnnnnnnnnnnnnnnnnnnnnnnnnnnnnnnnnnnnnnnnnnnnnnnnnnnnnnnnnnnnnnnnnnnnnnnnnnnnnnnnnnnnnnnnnnnnnnnnnnnnnnnnnnnnnnnnnnnnnnnnnnnnnnnnnnnnnnnnnnnnnnnnnnnnnnnnnnnnnnnnnnnnnnnnnnnnnnnnnnnnnnnnnnnnnnnnnnnnnnnnnnnnnnnnnnnnnnnnnnnnnnnnnnnnnnnnnnnnnnnnnnnnnnnnnnnnnnnnnnnnnnnnnnnnnnnnnnnnnnnnnnnnnnnnnnnnnnnnnnnnnnnnnnnnnnnnnnnnnnnnnnnnnnnnnnnnnnnnnnnnnnnnnnnnnnnnnnnnnnnnnnnnnnnnnnnnnnnnnnnnnnnnnnnnnnnnnnnnnnnnnnnnnnnnnnnnnnnnnnnnnnnnnnnnnnnnnnnnnnnnnnnnnnnnnnnnnnnnnnnnnnnnnnnnnnnnnnnnnnnnnnnnnnnnnnnnnnnnnnnnnnnnnnnnnnnnnnnnnnnnnnnnnnnnnnnnnnnnnnnnnnnnnnnnnnnnnnnnnnnnnnnnnnnnnnnnnnnnnnnnnnnnnnnnnnnnnnnnnnnnnnnnnnnnnnnnnnnnnnnnnnnnnnnnnnnnnnnnnnnnnnnnnnnnnnnnnnnnnnnnnnnnnnnnnnnnnnnnnnnnnnnnnnnnnnnnnnnnnnnnnnnnnnnnnnnnnnnnnnnnnnnnnnnnnnnnnnnnnnnnnnnnnnnnnnnnnnnnnnnnnnnnnnnnnnnnnnnnnnnnnnnnnnnnnnnnnnnnnnnnnnnnnnnnnnnnnnnnnnnnnnnnnnnnnnnnnnnnnnnnnnnnnnnnnnnnnnnnnnnnnnnnnnnnnnnnnnnnnnnnnnnnnnnnnnnnnnnnnnnnnnnnnnnnnnnnnnnnnnnnnnnnnnnnnnnnnnnnnnnnnnnnnnnnnnnnnnnnnnnnnnnnnnnnnnnnnnnnnnnnnnnnnnnnnnnnnnnnnnnnnnnnnnnnnnnnnnnnnnnnnnnnnnnnnnnnnnnnnnnnnnnnnnnnnnnnnnnnnnnnnnnnnnnnnnnnnnnnnnnnnnnnnnnnnnnnnnnnnnnnnnnnnnnnnnnnnnnnnnnnnnnnnnnnnnnnnnnnnnnnnnnnnnnnnnnnnnnnnnnnnnnnnnnnnnnnnnnnnnnnnnnnnnnnnnnnnnnnnnnnnnnnnnnnnnnnnnnnnnnnnnnnnnnnnnnnnnnnnnnnnnnnnnnnnnnnnnnnnnnnnnnnnnnnnnnnnnnnnnnnnnnnnnnnnnnnnnnnnnnnnnnnnnnnnnnnnnnnnnnnnnnnnnnnnnnnnnnnnnnnnnnnnnnnnnnnnnnnnnnnnnnnnnnnnnnnnnnnnnnnnnnnnnnnnnnnnnnnnnnnnnnnnnnnnnnnnnnnnnnnnnnnnnnnnnnnnnnnnnnnnnnnnnnnnnnnnnnnnnnnnnnnnnnnnnnnnnnnnnnnnnnnnnnnnnnnnnnnnnnnnnnnnnnnnnnnnnnnnnnnnnnnnnnnnnnnnnnnnnnnnnnnnnnnnnnnnnnnnnnnnnnnnnnnnnnnnnnnnnnnnnnnnnnnnnnnnnnnnnnnnnnnnnnnnnnnnnnnnnnnnnnnnnnnnnnnnnnnnnnnnnnnnnnnnnnnnnnnnnnnnnnnnnnnnnnnnnnnnnnnnnnnnnnnnnnnnnnnnnnnnnnnnnnnnnnnnnnnnnnnnnnnnnnnnnnnnnnnnnnnnnnnnnnnnnnnnnnnnnnnnnnnnnnnnnnnnnnnnnnnnnnnnnnnnnnnnnnnnnnnnnnnnnnnnnnnnnnnnnnnnnnnnnnnnnnnnnnnnnnnnnnnnnnnnnnnnnnnnnnnnnnnnnnnnnnnnnnnnnnnnnnnnnnnnnnnnnnnnnnnnnnnnnnnnnnnnnnnnnnnnnnnnnnnnnnnnnnnnnnnnnnnnnnnnnnnnnnnnnnnnnnnnnnnnnnnnnnnnnnnnnnnnnnnnnnnnnnnnnnnnnnnnnnnnnnnnnnnnnnnnnnnnnnnnnnnnnnnnnnnnnnnnnnnnnnnnnnnnnnnnnnnnnnnnnnnnnnnnnnnnnnnnnnnnnnnnnnnnnnnnnnnnnnnnnnnnnnnnnnnnnnnnnnnnnnnnnnnnnnnnnnnnnnnnnnnnnnnnnnnnnnnnnnnnnnnnnnnnnnnnnnnnnnnnnnnnnnnnnnnnnnnnnnnnnnnnnnnnnnnnnnnnnnnnnnnnnnnnnnnnnnnnnnnnnnnnnnnnnnnnnnnnnnnnnnnnnnnnnnnnnnnnnnnnnnnnnnnnnnnnnnnnnnnnnnnnnnnnnnnnnnnnnnnnnnnnnnnnnnnnnnnnnnnnnnnnnnnnnnnnnnnnnnnnnnnnnnnnnnnnnnnnnnnnnnnnnnnnnnnnnnnnnnnnnnnnnnnnnnnnnnnnnnnnnnnnnnnnnnnnnnnnnnnnnnnnnnnnnnnnnnnnnnnnnnnnnnnnnnnnnnnnnnnnnnnnnnnnnnnnnnnnnnnnnnnnnnnnnnnnnnnnnnnnnnnnnnnnnnnnnnnnnnnnnnnnnnnnnnnnnnnnnnnnnnnnnnnnnnnnnnnnnnnnnnnnnnnnnnnnnnnnnnnnnnnnnnnnnnnnnnnnnnnnnnnnnnnnnnnnnnnnnnnnnnnnnnnnnnnnnnnnnnnnnnnnnnnnnnnnnnnnnnnnnnnnnnnnnnnnnnnnnnnnnnnnnnnnnnnnnnnnnnnnnnnnnnnnnnnnnnnnnnnnnnnnnnnnnnnnnnnnnnnnnnnnnnnnnnnnnnnnnnnnnnnnnnnnnnnnnnnnnnnnnnnnnnnnnnnnnnnnnnnnnnnnnnnnnnnnnnnnnnnnnnnnnnnnnnnnnnnnnnnnnnnnnnnnnnnnnnnnnnnnnnnnnnnnnnnnnnnnnnnnnnnnnnnnnnnnnnnnnnnnnnnnnnnnnnnnnnnnnnnnnnnnnnnnnnnnnnnnnnnnnnnnnnnnnnnnnnnnnnnnnnnnnnnnnnnnnnnnnnnnnnnnnnnnnnnnnnnnnnnnnnnnnnnnnnnnnnnnnnnnnnnnnnnnnnnnnnnnnnnnnnnnnnnnnnnnnnnnnnnnnnnnnnnnnnnnnnnnnnnnnnnnnnnnnnnnnnnnnnnnnnnnnnnnnnnnnnnnnnnnnnnnnnnnnnnnnnnnnnnnnnnnnnnnnnnnnnnnnnnnnnnnnnnnnnnnnnnnnnnnnnnnnnnnnnnnnnnnnnnnnnnnnnnnnnnnnnnnnnnnnnnnnnnnnnnnnnnnnnnnnnnnnnnnnnnnnnnnnnnnnnnnnnnnnnnnnnnnnnnnnnnnnnnnnnnnnnnnnnnnnnnnnnnnnnnnnnnnnnnnnnnnnnnnnnnnnnnnnnnnnnnnnnnnnnnnnnnnnnnnnnnnnnnnnnnnnnnnnnnnnnnnnnnnnnnnnnnnnnnnnnnnnnnnnnnnnnnnnnnnnnnnnnnnnnnnnnnnnnnnnnnnnnnnnnnnnnnnnnnnnnnnnnnnnnnnnnnnnnnnnnnnnnnnnnnnnnnnnnnnnnnnnnnnnnnnnnnnnnnnnnnnnnnnnnnnnnnnnnnnnnnnnnnnnnnnnnnnnnnnnnnnnnnnnnnnnnnnnnnnnnnnnnnnnnnnnnnnnnnnnnnnnnnnnnnnnnnnnnnnnnnnnnnnnnnnnnnnnnnnnnnnnnnnnnnnnnnnnnnnnnnnnnnnnnnnnnnnnnnnnnnnnnnnnnnnnnnnnnnnnnnnnnnnnnnnnnnnnnnnnnnnnnnnnnnnnnnnnnnnnnnnnnnnnnnnnnnnnnnnnnnnnnnnnnnnnnnnnnnnnnnnnnnnnnnnnnnnnnnnnnnnnnnnnnnnnnnnnnnnnnnnnnnnnnnnnnnnnnnnnnnnnnnnnnnnnnnnnnnnnnnnnnnnnnnnnnnnnnnnnnnnnnnnnnnnnnnnnnnnnnnnnnnnnnnnnnnnnnnnnnnnnnnnnnnnnnnnnnnnnnnnnnnnnnnnnnnnnnnnnnnnnnnnnnnnnnnnnnnnnnnnnnnnnnnnnnnnnnnnnnnnnnnnnnnnnnnnnnnnnnnnnnnnnnnnnnnnnnnnnnnnnnnnnnnnnnnnnnnnnnnnnnnnnnnnnnnnnnnnnnnnnnnnnnnnnnnnnnnnnnnnnnnnnnnnnnnnnnnnnnnnnnnnnnnnnnnnnnnnnnnnnnnnnnnnnnnnnnnnnnnnnnnnnnnnnnnnnnnnnnnnnnnnnnnnnnnnnnnnnnnnnnnnnnnnnnnnnnnnnnnnnnnnnnnnnnnnnnnnnnnnnnnnnnnnnnnnnnnnnnnnnnnnnnnnnnnnnnnnnnnnnnnnnnnnnnnnnnnnnnnnnnnnnnnnnnnnnnnnnnnnnnnnnnnnnnnnnnnnnnnnnnnnnnnnnnnnnnnnnnnnnnnnnnnnnnnnnnnnnnnnnnnnnnnnnnnnnnnnnnnnnnnnnnnnnnnnnnnnnnnnnnnnnnnnnnnnnnnnnnnnnnnnnnnnnnnnnnnnnnnnnnnnnnnnnnnnnnnnnnnnnnnnnnnnnnnnnnnnnnnnnnnnnnnnnnnnnnnnnnnnnnnnnnnnnnnnnnnnnnnnnnnnnnnnnnnnnnnnnnnnnnnnnnnnnnnnnnnnnnnnnnnnnnnnnnnnnnnnnnnnnnnnnnnnnnnnnnnnnnnnnnnnnnnnnnnnnnnnnnnnnnnnnnnnnnnnnnnnnnnnnnnnnnnnnnnnnnnnnnnnnnnnnnnnnnnnnnnnnnnnnnnnnnnnnnnnnnnnnnnnnnnnnnnnnnnnnnnnnnnnnnnnnnnnnnnnnnnnnnnnnnnnnnnnnnnnnnnnnnnnnnnnnnnnnnnnnnnnnnnnnnnnnnnnnnnnnnnnnnnnnnnnnnnnnnnnnnnnnnnnnnnnnnnnnnnnnnnnnnnnnnnnnnnnnnnnnnnnnnnnnnnnnnnnnnnnnnnnnnnnnnnnnnnnnnnnnnnnnnnnnnnnnnnnnnnnnnnnnnnnnnnnnnnnnnnnnnnnnnnnnnnnnnnnnnnnnnnnnnnnnnnnnnnnnnnnnnnnnnnnnnnnnnnnnnnnnnnnnnnnnnnnnnnnnnnnnnnnnnnnnnnnnnnnnnnnnnnnnnnnnnnnnnnnnnnnnnnnnnnnnnnnnnnnnnnnnnnnnnnnnnnnnnnnnnnnnnnnnnnnnnnnnnnnnnnnnnnnnnnnnnnnnnnnnnnnnnnnnnnnnnnnnnnnnnnnnnnnnnnnnnnnnnnnnnnnnnnnnnnnnnnnnnnnnnnnnnnnnnnnnnnnnnnnnnnnnnnnnnnnnnnnnnnnnnnnnnnnnnnnnnnnnnnnnnnnnnnnnnnnnnnnnnnnnnnnnnnnnnnnnnnnnnnnnnnnnnnnnnnnnnnnnnnnnnnnnnnnnnnnnnnnnnnnnnnnnnnnnnnnnnnnnnnnnnnnnnnnnnnnnnnnnnnnnnnnnnnnnnnnnnnnnnnnnnnnnnnnnnnnnnnnnnnnnnnnnnnnnnnnnnnnnnnnnnnnnnnnnnnnnnnnnnnnnnnnnnnnnnnnnnnnnnnnnnnnnnnnnnnnnnnnnnnnnnnnnnnnnnnnnnnnnnnnnnnnnnnnnnnnnnnnnnnnnnnnnnnnnnnnnnnnnnnnnnnnnnnnnnnnnnnnnnnnnnnnnnnnnnnnnnnnnnnnnnnnnnnnnnnnnnnnnnnnnnnnnnnnnnnnnnnnnnnnnnnnnnnnnnnnnnnnnnnnnnnnnnnnnnnnnnnnnnnnnnnnnnnnnnnnnnnnnnnnnnnnnnnnnnnnnnnnnnnnnnnnnnnnnnnnnnnnnnnnnnnnnnnnnnnnnnnnnnnnnnnnnnnnnnnnnnnnnnnnnnnnnnnnnnnnnnnnnnnnnnnnnnnnnnnnnnnnnnnnnnnnnnnnnnnnnnnnnnnnnnnnnnnnnnnnnnnnnnnnnnnnnnnnnnnnnnnnnnnnnnnnnnnnnnnnnnnnnnnnnnnnnnnnnnnnnnnnnnnnnnnnnnnnnnnnnnnnnnnnnnnnnnnnnnnnnnnnnnnnnnnnnnnnnnnnnnnnnnnnnnnnnnnnnnnnnnnnnnnnnnnnnnnnnnnnnnnnnnnnnnnnnnnnnnnnnnnnnnnnnnnnnnnnnnnnnnnnnnnnnnnnnnnnnnnnnnnnnnnnnnnnnnnnnnnnnnnnnnnnnnnnnnnnnnnnnnnnnnnnnnnnnnnnnnnnnnnnnnnnnnnnnnnnnnnnnnnnnnnnnnnnnnnnnnnnnnnnnnnnnnnnnnnnnnnnnnnnnnnnnnnnnnnnnnnnnnnnnnnnnnnnnnnnnnnnnnnnnnnnnnnnnnnnnnnnnnnnnnnnnnnnnnnnnnnnnnnnnnnnnnnnnnnnnnnnnnnnnnnnnnnnnnnnnnnnnnnnnnnnnnnnnnnnnnnnnnnnnnnnnnnnnnnnnnnnnnnnnnnnnnnnnnnnnnnnnnnnnnnnnnnnnnnnnnnnnnnnnnnnnnnnnnnnnnnnnnnnnnnnnnnnnnnnnnnnnnnnnnnnnnnnnnnnnnnnnnnnnnnnnnnnnnnnnnnnnnnnnnnnnnnnnnnnnnnnnnnnnnnnnnnnnnnnnnnnnnnnnnnnnnnnnnnnnnnnnnnnnnnnnnnnnnnnnnnnnnnnnnnnnnnnnnnnnnnnnnnnnnnnnnnnnnnnnnnnnnnnnnnnnnnnnnnnnnnnnnnnnnnnnnnnnnnnnnnnnnnnnnnnnnnnnnnnnnnnnnnnnnnnnnnnnnnnnnnnnnnnnnnnnnnnnnnnnnnnnnnnnnnnnnnnnnnnnnnnnnnnnnnnnnnnnnnnnnnnnnnnnnnnnnnnnnnnnnnnnnnnnnnnnnnnnnnnnnnnnnnnnnnnnnnnnnnnnnnnnnnnnnnnnnnnnnnnnnnnnnnnnnnnnnnnnnnnnnnnnnnnnnnnnnnnnnnnnnnnnnnnnnnnnnnnnnnnnnnnnnnnnnnnnnnnnnnnnnnnnnnnnnnnnnnnnnnnnnnnnnnnnnnnnnnnnnnnnnnnnnnnnnnnnnnnnnnnnnnnnnnnnnnnnnnnnnnnnnnnnnnnnnnnnnnnnnnnnnnnnnnnnnnnnnnnnnnnnnnnnnnnnnnnnnnnnnnnnnnnnnnnnnnnnnnnnnnnnnnnnnnnnnnnnnnnnnnnnnnnnnnnnnnnnnnnnnnnnnnnnnnnnnnnnnnnnnnnnnnnnnnnnnnnnnnnnnnnnnnnnnnnnnnnnnnnnnnnnnnnnnnnnnnnnnnnnnnnnnnnnnnnnnnnnnnnnnnnnnnnnnnnnnnnnnnnnnnnnnnnnnnnnnnnnnnnnnnnnnnnnnnnnnnnnnnnnnnnnnnnnnnnnnnnnnnnnnnnnnnnnnnnnnnnnnnnnnnnnnnnnnnnnnnnnnnnnnnnnnnnnnnnnnnnnnnnnnnnnnnnnnnnnnnnnnnnnnnnnnnnnnnnnnnnnnnnnnnnnnnnnnnnnnnnnnnnnnnnnnnnnnnnnnnnnnnnnnnnnnnnnnnnnnnnnnnnnnnnnnnnnnnnnnnnnnnnnnnnnnnnnnnnnnnnnnnnnnnnnnnnnnnnnnnnnnnnnnnnnnnnnnnnnnnnnnnnnnnnnnnnnnnnnnnnnnnnnnnnnnnnnnnnnnnnnnnnnnnnnnnnnnnnnnnnnnnnnnnnnnnnnnnnnnnnnnnnnnnnnnnnnnnnnnnnnnnnnnnnnnnnnnnnnnnnnnnnnnnnnnnnnnnnnnnnnnnnnnnnnnnnnnnnnnnnnnnnnnnnnnnnnnnnnnnnnnnnnnnnnnnnnnnnnnnnnnnnnnnnnnnnnnnnnnnnnnnnnnnnnnnnnnnnnnnnnnnnnnnnnnnnnnnnnnnnnnnnnnnnnnnnnnnnnnnnnnnnnnnnnnnnnnnnnnnnnnnnnnnnnnnnnnnnnnnnnnnnnnnnnnnnnnnnnnnnnnnnnnnnnnnnnnnnnnnnnnnnnnnnnnnnnnnnnnnnnnnnnnnnnnnnnnnnnnnnnnnnnnnnnnnnnnnnnnnnnnnnnnnnnnnnnnnnnnnnnnnnnnnnnnnnnnnnnnnnnnnnnnnnnnnnnnnnnnnnnnnnnnnnnnnnnnnnnnnnnnnnnnnnnnnnnnnnnnnnnnnnnnnnnnnnnnnnnnnnnnnnnnnnnnnnnnnnnnnnnnnnnnnnnnnnnnnnnnnnnnnnnnnnnnnnnnnnnnnnnnnnnnnnnnnnnnnnnnnnnnnnnnnnnnnnnnnnnnnnnnnnnnnnnnnnnnnnnnnnnnnnnnnnnnnnnnnnnnnnnnnnnnnnnnnnnnnnnnnnnnnnnnnnnnnnnnnnnnnnnnnnnnnnnnnnnnnnnnnnnnnnnnnnnnnnnnnnnnnnnnnnnnnnnnnnnnnnnnnnnnnnnnnnnnnnnnnnnnnnnnnnnnnnnnnnnnnnnnnnnnnnnnnnnnnnnnnnnnnnnnnnnnnnnnnnnnnnnnnnnnnnnnnnnnnnnnnnnnnnnnnnnnnnnnnnnnnnnnnnnnnnnnnnnnnnnnnnnnnnnnnnnnnnnnnnnnnnnnnnnnnnnnnnnnnnnnnnnnnnnnnnnnnnnnnnnnnnnnnnnnnnnnnnnnnnnnnnnnnnnnnnnnnnnnnnnnnnnnnnnnnnnnnnnnnnnnnnnnnnnnnnnnnnnnnnnnnnnnnnnnnnnnnnnnnnnnnnnnnnnnnnnnnnnnnnnnnnnnnnnnnnnnnnnnnnnnnnnnnnnnnnnnnnnnnnnnnnnnnnnnnnnnnnnnnnnnnnnnnnnnnnnnnnnnnnnnnnnnnnnnnnnnnnnnnnnnnnnnnnnnnnnnnnnnnnnnnnnnnnnnnnnnnnnnnnnnnnnnnnnnnnnnnnnnnnnnnnnnnnnnnnnnnnnnnnnnnnnnnnnnnnnnnnnnnnnnnnnnnnnnnnnnnnnnnnnnnnnnnnnnnnnnnnnnnnnnnnnnnnnnnnnnnnnnnnnnnnnnnnnnnnnnnnnnnnnnnnnnnnnnnnnnnnnnnnnnnnnnnnnnnnnnnnnnnnnnnnnnnnnnnnnnnnnnnnnnnnnnnnnnnnnnnnnnnnnnnnnnnnnnnnnnnnnnnnnnnnnnnnnnnnnnnnnnnnnnnnnnnnnnnnnnnnnnnnnnnnnnnnnnnnnnnnnnnnnnnnnnnnnnnnnnnnnnnnnnnnnnnnnnnnnnnnnnnnnnnnnnnnnnnnnnnnnnnnnnnnnnnnnnnnnnnnnnnnnnnnnnnnnnnnnnnnnnnnnnnnnnnnnnnnnnnnnnnnnnnnnnnnnnnnnnnnnnnnnnnnnnnnnnnnnnnnnnnnnnnnnnnnnnnnnnnnnnnnnnnnnnnnnnnnnnnnnnnnnnnnnnnnnnnnnnnnnnnnnnnnnnnnnnnnnnnnnnnnnnnnnnnnnnnnnnnnnnnnnnnnnnnnnnnnnnnnnnnnnnnnnnnnnnnnnnnnnnnnnnnnnnnnnnnnnnnnnnnnnnnnnnnnnnnnnnnnnnnnnnnnnnnnnnnnnnnnnnnnnnnnnnnnnnnnnnnnnnnnnnnnnnnnnnnnnnnnnnnnnnnnnnnnnnnnnnnnnnnnnnnnnnnnnnnnnnnnnnnnnnnnnnnnnnnnnnnnnnnnnnnnnnnnnnnnnnnnnnnnnnnnnnnnnnnnnnnnnnnnnnnnnnnnnnnnnnnnnnnnnnnnnnnnnnnnnnnnnnnnnnnnnnnnnnnnnnnnnnnnnnnnnnnnnnnnnnnnnnnnnnnnnnnnnnnnnnnnnnnnnnnnnnnnnnnnnnnnnnnnnnnnnnnnnnnnnnnnnnnnnnnnnnnnnnnnnnnnnnnnnnnnnnnnnnnnnnnnnnnnnnnnnnnnnnnnnnnnnnnnnnnnnnnnnnnnnnnnnnnnnnnnnnnnnnnnnnnnnnnnnnnnnnnnnnnnnnnnnnnnnnnnnnnnnnnnnnnnnnnnnnnnnnnnnnnnnnnnnnnnnnnnnnnnnnnnnnnnnnnnnnnnnnnnnnnnnnnnnnnnnnnnnnnnnnnnnnnnnnnnnnnnnnnnnnnnnnnnnnnnnnnnnnnnnnnnnnnnnnnnnnnnnnnnnnnnnnnnnnnnnnnnnnnnnnnnnnnnnnnnnnnnnnnnnnnnnnnnnnnnnnnnnnnnnnnnnnnnnnnnnnnnnnnnnnnnnnnnnnnnnnnnnnnnnnnnnnnnnnnnnnnnnnnnnnnnnnnnnnnnnnnnnnnnnnnnnnnnnnnnnnnnnnnnnnnnnnnnnnnnnnnnnnnnnnnnnnnnnnnnnnnnnnnnnnnnnnnnnnnnnnnnnnnnnnnnnnnnnnnnnnnnnnnnnnnnnnnnnnnnnnnnnnnnnnnnnnnnnnnnnnnnnnnnnnnnnnnnnnnnnnnnnnnnnnnnnnnnnnnnnnnnnnnnnnnnnnnnnnnnnnnnnnnnnnnnnnnnnnnnnnnnnnnnnnnnnnnnnnnnnnnnnnnnnnnnnnnnnnnnnnnnnnnnnnnnnnnnnnnnnnnnnnnnnnnnnnnnnnnnnnnnnnnnnnnnnnnnnnnnnnnnnnnnnnnnnnnnnnnnnnnnnnnnnnnnnnnnnnnnnnnnnnnnnnnnnnnnnnnnnnnnnnnnnnnnnnnnnnnnnnnnnnnnnnnnnnnnnnnnnnnnnnnnnnnnnnnnnnnnnnnnnnnnnnnnnnnnnnnnnnnnnnnnnnnnnnnnnnnnnnnnnnnnnnnnnnnnnnnnnnnnnnnnnnnnnnnnnnnnnnnnnnnnnnnnnnnnnnnnnnnnnnnnnnnnnnnnnnnnnnnnnnnnnnnnnnnnnnnnnnnnnnnnnnnnnnnnnnnnnnnnnnnnnnnnnnnnnnnnnnnnnnnnnnnnnnnnnnnnnnnnnnnnnnnnnnnnnnnnnnnnnnnnnnnnnnnnnnnnnnnnnnnnnnnnnnnnnnnnnnnnnnnnnnnnnnnnnnnnnnnnnnnnnnnnnnnnnnnnnnnnnnnnnnnnnnnnnnnnnnnnnnnnnnnnnnnnnnnnnnnnnnnnnnnnnnnnnnnnnnnnnnnnnnnnnnnnnnnnnnnnnnnnnnnnnnnnnnnnnnnnnnnnnnnnnnnnnnnnnnnnnnnnnnnnnnnnnnnnnnnnnnnnnnnnnnnnnnnnnnnnnnnnnnnnnnnnnnnnnnnnnnnnnnnnnnnnnnnnnnnnnnnnnnnnnnnnnnnnnnnnnnnnnnnnnnnnnnnnnnnnnnnnnnnnnnnnnnnnnnnnnnnnnnnnnnnnnnnnnnnnnnnnnnnnnnnnnnnnnnnnnnnnnnnnnnnnnnnnnnnnnnnnnnnnnnnnnnnnnnnnnnnnnnnnnnnnnnnnnnnnnnnnnnnnnnnnnnnnnnnnnnnnnnnnnnnnnnnnnnnnnnnnnnnnnnnnnnnnnnnnnnnnnnnnnnnnnnnnnnnnnnnnnnnnnnnnnnnnnnnnnnnnnnnnnnnnnnnnnnnnnnnnnnnnnnnnnnnnnnnnnnnnnnnnnnnnnnnnnnnnnnnnnnnnnnnnnnnnnnnnnnnnnnnnnnnnnnnnnnnnnnnnnnnnnnnnnnnnnnnnnnnnnnnnnnnnnnnnnnnnnnnnnnnnnnnnnnnnnnnnnnnnnnnnnnnnnnnnnnnnnnnnnnnnnnnnnnnnnnnnnnnnnnnnnnnnnnnnnnnnnnnnnnnnnnnnnnnnnnnnnnnnnnnnnnnnnnnnnnnnnnnnnnnnnnnnnnnnnnnnnnnnnnnnnnnnnnnnnnnnnnnnnnnnnnnnnnnnnnnnnnnnnnnnnnnnnnnnnnnnnnnnnnnnnnnnnnnnnnnnnnnnnnnnnnnnnnnnnnnnnnnnnnnnnnnnnnnnnnnnnnnnnnnnnnnnnnnnnnnnnnnnnnnnnnnnnnnnnnnnnnnnnnnnnnnnnnnnnnnnnnnnnnnnnnnnnnnnnnnnnnnnnnnnnnnnnnnnnnnnnnnnnnnnnnnnnnnnnnnnnnnnnnnnnnnnnnnnnnnnnnnnnnnnnnnnnnnnnnnnnnnnnnnnnnnnnnnnnnnnnnnnnnnnnnnnnnnnnnnnnnnnnnnnnnnnnnnnnnnnnnnnnnnnnnnnnnnnnnnnnnnnnnnnnnnnnnnnnnnnnnnnnnnnnnnnnnnnnnnnnnnnnnnnnnnnnnnnnnnnnnnnnnnnnnnnnnnnnnnnnnnnnnnnnnnnnnnnnnnnnnnnnnnnnnnnnnnnnnnnnnnnnnnnnnnnnnnnnnnnnnnnnnnnnnnnnnnnnnnnnnnnnnnnnnnnnnnnnnnnnnnnnnnnnnnnnnnnnnnnnnnnnnnnnnnnnnnnnnnnnnnnnnnnnnnnnnnnnnnnnnnnnnnnnnnnnnnnnnnnnnnnnnnnnnnnnnnnnnnnnnnnnnnnnnnnnnnnnnnnnnnnnnnnnnnnnnnnnnnnnnnnnnnnnnnnnnnnnnnnnnnnnnnnnnnnnnnnnnnnnnnnnnnnnnnnnnnnnnnnnnnnnnnnnnnnnnnnnnnnnnnnnnnnnnnnnnnnnnnnnnnnnnnnnnnnnnnnnnnnnnnnnnnnnnnnnnnnnnnnnnnnnnnnnnnnnnnnnnnnnnnnnnnnnnnnnnnnnnnnnnnnnnnnnnnnnnnnnnnnnnnnnnnnnnnnnnnnnnnnnnnnnnnnnnnnnnnnnnnnnnnnnnnnnnnnnnnnnnnnnnnnnnnnnnnnnnnnnnnnnnnnnnnnnnnnnnnnnnnnnnnnnnnnnnnnnnnnnnnnnnnnnnnnnnnnnnnnnnnnnnnnnnnnnnnnnnnnnnnnnnnnnnnnnnnnnnnnnnnnnnnnnnnnnnnnnnnnnnnnnnnnnnnnnnnnnnnnnnnnnnnnnnnnnnnnnnnnnnnnnnnnnnnnnnnnnnnnnnnnnnnnnnnnnnnnnnnnnnnnnnnnnnnnnnnnnnnnnnnnnnnnnnnnnnnnnnnnnnnnnnnnnnnnnnnnnnnnnnnnnnnnnnnnnnnnnnnnnnnnnnnnnnnnnnnnnnnnnnnnnnnnnnnnnnnnnnnnnnnnnnnnnnnnnnnnnnnnnnnnnnnnnnnnnnnnnnnnnnnnnnnnnnnnnnnnnnnnnnnnnnnnnnnnnnnnnnnnnnnnnnnnnnnnnnnnnnnnnnnnnnnnnnnnnnnnnnnnnnnnnnnnnnnnnnnnnnnnnnnnnnnnnnnnnnnnnnnnnnnnnnnnnnnnnnnnnnnnnnnnnnnnnnnnnnnnnnnnnnnnnnnnnnnnnnnnnnnnnnnnnnnnnnnnnnnnnnnnnnnnnnnnnnnnnnnnnnnnnnnnnnnnnnnnnnnnnnnnnnnnnnnnnnnnnnnnnnnnnnnnnnnnnnnnnnnnnnnnnnnnnnnnnnnnnnnnnnnnnnnnnnnnnnnnnnnnnnnnnnnnnnnnnnnnnnnnnnnnnnnnnnnnnnnnnnnnnnnnnnnnnnnnnnnnnnnnnnnnnnnnnnnnnnnnnnnnnnnnnnnnnnnnnnnnnnnnnnnnnnnnnnnnnnnnnnnnnnnnnnnnnnnnnnnnnnnnnnnnnnnnnnnnnnnnnnnnnnnnnnnnnnnnnnnnnnnnnnnnnnnnnnnnnnnnnnnnnnnnnnnnnnnnnnnnnnnnnnnnnnnnnnnnnnnnnnnnnnnnnnnnnnnnnnnnnnnnnnnnnnnnnnnnnnnnnnnnnnnnnnnnnnnnnnnnnnnnnnnnnnnnnnnnnnnnnnnnnnnnnnnnnnnnnnnnnnnnnnnnnnnnnnnnnnnnnnnnnnnnnnnnnnnnnnnnnnnnnnnnnnnnnnnnnnnnnnnnnnnnnnnnnnnnnnnnnnnnnnnnnnnnnnnnnnnnnnnnnnnnnnnnnnnnnnnnnnnnnnnnnnnnnnnnnnnnnnnnnnnnnnnnnnnnnnnnnnnnnnnnnnnnnnnnnnnnnnnnnnnnnnnnnnnnnnnnnnnnnnnnnnnnnnnnnnnnnnnnnnnnnnnnnnnnnnnnnnnnnnnnnnnnnnnnnnnnnnnnnnnnnnnnnnnnnnnnnnnnnnnnnnnnnnnnnnnnnnnnnnnnnnnnnnnnnnnnnnnnnnnnnnnnnnnnnnnnnnnnnnnnnnnnnnnnnnnnnnnnnnnnnnnnnnnnnnnnnnnnnnnnnnnnnnnnnnnnnnnnnnnnnnnnnnnnnnnnnnnnnnnnnnnnnnnnnnnnnnnnnnnnnnnnnnnnnnnnnnnnnnnnnnnnnnnnnnnnnnnnnnnnnnnnnnnnnnnnnnnnnnnnnnnnnnnnnnnnnnnnnnnnnnnnnnnnnnnnnnnnnnnnnnnnnnnnnnnnnnnnnnnnnnnnnnnnnnnnnnnnnnnnnnnnnnnnnnnnnnnnnnnnnnnnnnnnnnnnnnnnnnnnnnnnnnnnnnnnnnnnnnnnnnnnnnnnnnnnnnnnnnnnnnnnnnnnnnnnnnnnnnnnnnnnnnnnnnnnnnnnnnnnnnnnnnnnnnnnnnnnnnnnnnnnnnnnnnnnnnnnnnnnnnnnnnnnnnnnnnnnnnnnnnnnnnnnnnnnnnnnnnnnnnnnnnnnnnnnnnnnnnnnnnnnnnnnnnnnnnnnnnnnnnnnnnnnnnnnnnnnnnnnnnnnnnnnnnnnnnnnnnnnnnnnnnnnnnnnnnnnnnnnnnnnnnnnnnnnnnnnnnnnnnnnnnnnnnnnnnnnnnnnnnnnnnnnnnnnnnnnnnnnnnnnnnnnnnnnnnnnnnnnnnnnnnnnnnnnnnnnnnnnnnnnnnnnnnnnnnnnnnnnnnnnnnnnnnnnnnnnnnnnnnnnnnnnnnnnnnnnnnnnnnnnnnnnnnnnnnnnnnnnnnnnnnnnnnnnnnnnnnnnnnnnnnnnnnnnnnnnnnnnnnnnnnnnnnnnnnnnnnnnnnnnnnnnnnnnnnnnnnnnnnnnnnnnnnnnnnnnnnnnnnnnnnnnnnnnnnnnnnnnnnnnnnnnnnnnnnnnnnnnnnnnnnnnnnnnnnnnnnnnnnnnnnnnnnnnnnnnnnnnnnnnnnnnnnnnnnnnnnnnnnnnnnnnnnnnnnnnnnnnnnnnnnnnnnnnnnnnnnnnnnnnnnnnnnnnnnnnnnnnnnnnnnnnnnnnnnnnnnnnnnnnnnnnnnnnnnnnnnnnnnnnnnnnnnnnnnnnnnnnnnnnnnnnnnnnnnnnnnnnnnnnnnnnnnnnnnnnnnnnnnnnnnnnnnnnnnnnnnnnnnnnnnnnnnnnnnnnnnnnnnnnnnnnnnnnnnnnnnnnnnnnnnnnnnnnnnnnnnnnnnnnnnnnnnnnnnnnnnnnnnnnnnnnnnnnnnnnnnnnnnnnnnnnnnnnnnnnnnnnnnnnnnnnnnnnnnnnnnnnnnnnnnnnnnnnnnnnnnnnnnnnnnnnnnnnnnnnnnnnnnnnnnnnnnnnnnnnnnnnnnnnnnnnnnnnnnnnnnnnnnnnnnnnnnnnnnnnnnnnnnnnnnnnnnnnnnnnnnnnnnnnnnnnnnnnnnnnnnnnnnnnnnnnnnnnnnnnnnnnnnnnnnnnnnnnnnnnnnnnnnnnnnnnnnnnnnnnnnnnnnnnnnnnnnnnnnnnnnnnnnnnnnnnnnnnnnnnnnnnnnnnnnnnnnnnnnnnnnnnnnnnnnnnnnnnnnnnnnnnnnnnnnnnnnnnnnnnnnnnnnnnnnnnnnnnnnnnnnnnnnnnnnnnnnnnnnnnnnnnnnnnnnnnnnnnnnnnnnnnnnnnnnnnnnnnnnnnnnnnnnnnnnnnnnnnnnnnnnnnnnnnnnnnnnnnnnnnnnnnnnnnnnnnnnnnnnnnnnnnnnnnnnnnnnnnnnnnnnnnnnnnnnnnnnnnnnnnnnnnnnnnnnnnnnnnnnnnnnnnnnnnnnnnnnnnnnnnnnnnnnnnnnnnnnnnnnnnnnnnnnnnnnnnnnnnnnnnnnnnnnnnnnnnnnnnnnnnnnnnnnnnnnnnnnnnnnnnnnnnnnnnnnnnnnnnnnnnnnnnnnnnnnnnnnnnnnnnnnnnnnnnnnnnnnnnnnnnnnnnnnnnnnnnnnnnnnnnnnnnnnnnnnnnnnnnnnnnnnnnnnnnnnnnnnnnnnnnnnnnnnnnnnnnnnnnnnnnnnnnnnnnnnnnnnnnnnnnnnnnnnnnnnnnnnnnnnnnnnnnnnnnnnnnnnnnnnnnnnnnnnnnnnnnnnnnnnnnnnnnnnnnnnnnnnnnnnnnnnnnnnnnnnnnnnnnnnnnnnnnnnnnnnnnnnnnnnnnnnnnnnnnnnnnnnnnnnnnnnnnnnnnnnnnnnnnnnnnnnnnnnnnnnnnnnnnnnnnnnnnnnnnnnnnnnnnnnnnnnnnnnnnnnnnnnnnnnnnnnnnnnnnnnnnnnnnnnnnnnnnnnnnnnnnnnnnnnnnnnnnnnnnnnnnnnnnnnnnnnnnnnnnnnnnnnnnnnnnnnnnnnnnnnnnnnnnnnnnnnnnnnnnnnnnnnnnnnnnnnnnnnnnnnnnnnnnnnnnnnnnnnnnnnnnnnnnnnnnnnnnnnnnnnnnnnnnnnnnnnnnnnnnnnnnnnnnnnnnnnnnnnnnnnnnnnnnnnnnnnnnnnnnnnnnnnnnnnnnnnnnnnnnnnnnnnnnnnnnnnnnnnnnnnnnnnnnnnnnnnnnnnnnnnnnnnnnnnnnnnnnnnnnnnnnnnnnnnnnnnnnnnnnnnnnnnnnnnnnnnnnnnnnnnnnnnnnnnnnnnnnnnnnnnnnnnnnnnnnnnnnnnnnnnnnnnnnnnnnnnnnnnnnnnnnnnnnnnnnnnnnnnnnnnnnnnnnnnnnnnnnnnnnnnnnnnnnnnnnnnnnnnnnnnnnnnnnnnnnnnnnnnnnnnnnnnnnnnnnnnnnnnnnnnnnnnnnnnnnnnnnnnnnnnnnnnnnnnnnnnnnnnnnnnnnnnnnnnnnnnnnnnnnnnnnnnnnnnnnnnnnnnnnnnnnnnnnnnnnnnnnnnnnnnnnnnnnnnnnnnnnnnnnnnnnnnnnnnnnnnnnnnnnnnnnnnnnnnnnnnnnnnnnnnnnnnnnnnnnnnnnnnnnnnnnnnnnnnnnnnnnnnnnnnnnnnnnnnnnnnnnnnnnnnnnnnnnnnnnnnnnnnnnnnnnnnnnnnnnnnnnnnnnnnnnnnnnnnnnnnnnnnnnnnnnnnnnnnnnnnnnnnnnnnnnnnnnnnnnnnnnnnnnnnnnnnnnnnnnnnnnnnnnnnnnnnnnnnnnnnnnnnnnnnnnnnnnnnnnnnnnnnnnnnnnnnnnnnnnnnnnnnnnnnnnnnnnnnnnnnnnnnnnnnnnnnnnnnnnnnnnnnnnnnnnnnnnnnnnnnnnnnnnnnnnnnnnnnnnnnnnnnnnnnnnnnnnnnnnnnnnnnnnnnnnnnnnnnnnnnnnnnnnnnnnnnnnnnnnnnnnnnnnnnnnnnnnnnnnnnnnnnnnnnnnnnnnnnnnnnnnnnnnnnnnnnnnnnnnnnnnnnnnnnnnnnnnnnnnnnnnnnnnnnnnnnnnnnnnnnnnnnnnnnnnnnnnnnnnnnnnnnnnnnnnnnnnnnnnnnnnnnnnnnnnnnnnnnnnnnnnnnnnnnnnnnnnnnnnnnnnnnnnnnnnnnnnnnnnnnnnnnnnnnnnnnnnnnnnnnnnnnnnnnnnnnnnnnnnnnnnnnnnnnnnnnnnnnnnnnnnnnnnnnnnnnnnnnnnnnnnnnnnnnnnnnnnnnnnnnnnnnnnnnnnnnnnnnnnnnnnnnnnnnnnnnnnnnnnnnnnnnnnnnnnnnnnnnnnnnnnnnnnnnnnnnnnnnnnnnnnnnnnnnnnnnnnnnnnnnnnnnnnnnnnnnnnnnnnnnnnnnnnnnnnnnnnnnnnnnnnnnnnnnnnnnnnnnnnnnnnnnnnnnnnnnnnnnnnnnnnnnnnnnnnnnnnnnnnnnnnnnnnnnnnnnnnnnnnnnnnnnnnnnnnnnnnnnnnnnnnnnnnnnnnnnnnnnnnnnnnnnnnnnnnnnnnnnnnnnnnnnnnnnnnnnnnnnnnnnnnnnnnnnnnnnnnnnnnnnnnnnnnnnnnnnnnnnnnnnnnnnnnnnnnnnnnnnnnnnnnnnnnnnnnnnnnnnnnnnnnnnnnnnnnnnnnnnnnnnnnnnnnnnnnnnnnnnnnnnnnnnnnnnnnnnnnnnnnnnnnnnnnnnnnnnnnnnnnnnnnnnnnnnnnnnnnnnnnnnnnnnnnnnnnnnnnnnnnnnnnnnnnnnnnnnnnnnnnnnnnnnnnnnnnnnnnnnnnnnnnnnnnnnnnnnnnnnnnnnnnnnnnnnnnnnnnnnnnnnnnnnnnnnnnnnnnnnnnnnnnnnnnnnnnnnnnnnnnnnnnnnnnnnnnnnnnnnnnnnnnnnnnnnnnnnnnnnnnnnnnnnnnnnnnnnnnnnnnnnnnnnnnnnnnnnnnnnnnnnnnnnnnnnnnnnnnnnnnnnnnnnnnnnnnnnnnnnnnnnnnnnnnnnnnnnnnnnnnnnnnnnnnnnnnnnnnnnnnnnnnnnnnnnnnnnnnnnnnnnnnnnnnnnnnnnnnnnnnnnnnnnnnnnnnnnnnnnnnnnnnnnnnnnnnnnnnnnnnnnnnnnnnnnnnnnnnnnnnnnnnnnnnnnnnnnnnnnnnnnnnnnnnnnnnnnnnnnnnnnnnnnnnnnnnnnnnnnnnnnnnnnnnnnnnnnnnnnnnnnnnnnnnnnnnnnnnnnnnnnnnnnnnnnnnnnnnnnnnnnnnnnnnnnnnnnnnnnnnnnnnnnnnnnnnnnnnnnnnnnnnnnnnnnnnnnnnnnnnnnnnnnnnnnnnnnnnnnnnnnnnnnnnnnnnnnnnnnnnnnnnnnnnnnnnnnnnnnnnnnnnnnnnnnnnnnnnnnnnnnnnnnnnnnnnnnnnnnnnnnnnnnnnnnnnnnnnnnnnnnnnnnnnnnnnnnnnnnnnnnnnnnnnnnnnnnnnnnnnnnnnnnnnnnnnnnnnnnnnnnnnnnnnnnnnnnnnnnnnnnnnnnnnnnnnnnnnnnnnnnnnnnnnnnnnnnnnnnnnnnnnnnnnnnnnnnnnnnnnnnnnnnnnnnnnnnnnnnnnnnnnnnnnnnnnnnnnnnnnnnnnnnnnnnnnnnnnnnnnnnnnnnnnnnnnnnnnnnnnnnnnnnnnnnnnnnnnnnnnnnnnnnnnnnnnnnnnnnnnnnnnnnnnnnnnnnnnnnnnnnnnnnnnnnnnnnnnnnnnnnnnnnnnnnnnnnnnnnnnnnnnnnnnnnnnnnnnnnnnnnnnnnnnnnnnnnnnnnnnnnnnnnnnnnnnnnnnnnnnnnnnnnnnnnnnnnnnnnnnnnnnnnnnnnnnnnnnnnnnnnnnnnnnnnnnnnnnnnnnnnnnnnnnnnnnnnnnnnnnnnnnnnnnnnnnnnnnnnnnnnnnnnnnnnnnnnnnnnnnnnnnnnnnnnnnnnnnnnnnnnnnnnnnnnnnnnnnnnnnnnnnnnnnnnnnnnnnnnnnnnnnnnnnnnnnnnnnnnnnnnnnnnnnnnnnnnnnnnnnnnnnnnnnnnnnnnnnnnnnnnnnnnnnnnnnnnnnnnnnnnnnnnnnnnnnnnnnnnnnnnnnnnnnnnnnnnnnnnnnnnnnnnnnnnnnnnnnnnnnnnnnnnnnnnnnnnnnnnnnnnnnnnnnnnnnnnnnnnnnnnnnnnnnnnnnnnnnnnnnnnnnnnnnnnnnnnnnnnnnnnnnnnnnnnnnnnnnnnnnnnnnnnnnnnnnnnnnnnnnnnnnnnnnnnnnnnnnnnnnnnnnnnnnnnnnnnnnnnnnnnnnnnnnnnnnnnnnnnnnnnnnnnnnnnnnnnnnnnnnnnnnnnnnnnnnnnnnnnnnnnnnnnnnnnnnnnnnnnnnnnnnnnnnnnnnnnnnnnnnnnnnnnnnnnnnnnnnnnnnnnnnnnnnnnnnnnnnnnnnnnnnnnnnnnnnnnnnnnnnnnnnnnnnnnnnnnnnnnnnnnnnnnnnnnnnnnnnnnnnnnnnnnnnnnnnnnnnnnnnnnnnnnnnnnnnnnnnnnnnnnnnnnnnnnnnnnnnnnnnnnnnnnnnnnnnnnnnnnnnnnnnnnnnnnnnnnnnnnnnnnnnnnnnnnnnnnnnnnnnnnnnnnnnnnnnnnnnnnnnnnnnnnnnnnnnnnnnnnnnnnnnnnnnnnnnnnnnnnnnnnnnnnnnnnnnnnnnnnnnnnnnnnnnnnnnnnnnnnnnnnnnnnnnnnnnnnnnnnnnnnnnnnnnnnnnnnnnnnnnnnnnnnnnnnnnnnnnnnnnnnnnnnnnnnnnnnnnnnnnnnnnnnnnnnnnnnnnnnnnnnnnnnnnnnnnnnnnnnnnnnnnnnnnnnnnnnnnnnnnnnnnnnnnnnnnnnnnnnnnnnnnnnnnnnnnnnnnnnnnnnnnnnnnnnnnnnnnnnnnnnnnnnnnnnnnnnnnnnnnnnnnnnnnnnnnnnnnnnnnnnnnnnnnnnnnnnnnnnnnnnnnnnnnnnnnnnnnnnnnnnnnnnnnnnnnnnnnnnnnnnnnnnnnnnnnnnnnnnnnnnnnnnnnnnnnnnnnnnnnnnnnnnnnnnnnnnnnnnnnnnnnnnnnnnnnnnnnnnnnnnnnnnnnnnnnnnnnnnnnnnnnnnnnnnnnnnnnnnnnnnnnnnnnnnnnnnnnnnnnnnnnnnnnnnnnnnnnnnnnnnnnnnnnnnnnnnnnnnnnnnnnnnnnnnnnnnnnnnnnnnnnnnnnnnnnnnnnnnnnnnnnnnnnnnnnnnnnnnnnnnnnnnnnnnnnnnnnnnnnnnnnnnnnnnnnnnnnnnnnnnnnnnnnnnnnnnnnnnnnnnnnnnnnnnnnnnnnnnnnnnnnnnnnnnnnnnnnnnnnnnnnnnnnnnnnnnnnnnnnnnnnnnnnnnnnnnnnnnnnnnnnnnnnnnnnnnnnnnnnnnnnnnnnnnnnnnnnnnnnnnnnnnnnnnnnnnnnnnnnnnnnnnnnnnnnnnnnnnnnnnnnnnnnnnnnnnnnnnnnnnnnnnnnnnnnnnnnnnnnnnnnnnnnnnnnnnnnnnnnnnnnnnnnnnnnnnnnnnnnnnnnnnnnnnnnnnnnnnnnnnnnnnnnnnnnnnnnnnnnnnnnnnnnnnnnnnnnnnnnnnnnnnnnnnnnnnnnnnnnnnnnnnnnnnnnnnnnnnnnnnnnnnnnnnnnnnnnnnnnnnnnnnnnnnnnnnnnnnnnnnnnnnnnnnnnnnnnnnnnnnnnnnnnnnnnnnnnnnnnnnnnnnnnnnnnnnnnnnnnnnnnnnnnnnnnnnnnnnnnnnnnnnnnnnnnnnnnnnnnnnnnnnnnnnnnnnnnnnnnnnnnnnnnnnnnnnnnnnnnnnnnnnnnnnnnnnnnnnnnnnnnnnnnnnnnnnnnnnnnnnnnnnnnnnnnnnnnnnnnnnnnnnnnnnnnnnnnnnnnnnnnnnnnnnnnnnnnnnnnnnnnnnnnnnnnnnnnnnnnnnnnnnnnnnnnnnnnnnnnnnnnnnnnnnnnnnnnnnnnnnnnnnnnnnnnnnnnnnnnnnnnnnnnnnnnnnnnnnnnnnnnnnnnnnnnnnnnnnnnnnnnnnnnnnnnnnnnnnnnnnnnnnnnnnnnnnnnnnnnnnnnnnnnnnnnnnnnnnnnnnnnnnnnnnnnnnnnnnnnnnnnnnnnnnnnnnnnnnnnnnnnnnnnnnnnnnnnnnnnnnnnnnnnnnnnnnnnnnnnnnnnnnnnnnnnnnnnnnnnnnnnnnnnnnnnnnnnnnnnnnnnnnnnnnnnnnnnnnnnnnnnnnnnnnnnnnnnnnnnnnnnnnnnnnnnnnnnnnnnnnnnnnnnnnnnnnnnnnnnnnnnnnnnnnnnnnnnnnnnnnnnnnnnnnnnnnnnnnnnnnnnnnnnnnnnnnnnnnnnnnnnnnnnnnnnnnnnnnnnnnnnnnnnnnnnnnnnnnnnnnnnnnnnnnnnnnnnnnnnnnnnnnnnnnnnnnnnnnnnnnnnnnnnnnnnnnnnnnnnnnnnnnnnnnnnnnnnnnnnnnnnnnnnnnnnnnnnnnnnnnnnnnnnnnnnnnnnnnnnnnnnnnnnnnnnnnnnnnnnnnnnnnnnnnnnnnnnnnnnnnnnnnnnnnnnnnnnnnnnnnnnnnnnnnnnnnnnnnnnnnnnnnnnnnnnnnnnnnnnnnnnnnnnnnnnnnnnnnnnnnnnnnnnnnnnnnnnnnnnnnnnnnnnnnnnnnnnnnnnnnnnnnnnnnnnnnnnnnnnnnnnnnnnnnnnnnnnnnnnnnnnnnnnnnnnnnnnnnnnnnnnnnnnnnnnnnnnnnnnnnnnnnnnnnnnnnnnnnnnnnnnnnnnnnnnnnnnnnnnnnnnnnnnnnnnnnnnnnnnnnnnnnnnnnnnnnnnnnnnnnnnnnnnnnnnnnnnnnnnnnnnnnnnnnnnnnnnnnnnnnnnnnnnnnnnnnnnnnnnnnnnnnnnnnnnnnnnnnnnnnnnnnnnnnnnnnnnnnnnnnnnnnnnnnnnnnnnnnnnnnnnnnnnnnnnnnnnnnnnnnnnnnnnnnnnnnnnnnnnnnnnnnnnnnnnnnnnnnnnnnnnnnnnnnnnnnnnnnnnnnnnnnnnnnnnnnnnnnnnnnnnnnnnnnnnnnnnnnnnnnnnnnnnnnnnnnnnnnnnnnnnnnnnnnnnnnnnnnnnnnnnnnnnnnnnnnnnnnnnnnnnnnnnnnnnnnnnnnnnnnnnnnnnnnnnnnnnnnnnnnnnnnnnnnnnnnnnnnnnnnnnnnnnnnnnnnnnnnnnnnnnnnnnnnnnnnnnnnnnnnnnnnnnnnnnnnnnnnnnnnnnnnnnnnnnnnnnnnnnnnnnnnnnnnnnnnnnnnnnnnnnnnnnnnnnnnnnnnnnnnnnnnnnnnnnnnnnnnnnnnnnnnnnnnnnnnnnnnnnnnnnnnnnnnnnnnnnnnnnnnnnnnnnnnnnnnnnnnnnnnnnnnnnnnnnnnnnnnnnnnnnnnnnnnnnnnnnnnnnnnnnnnnnnnnnnnnnnnnnnnnnnnnnnnnnnnnnnnnnnnnnnnnnnnnnnnnnnnnnnnnnnnnnnnnnnnnnnnnnnnnnnnnnnnnnnnnnnnnnnnnnnnnnnnnnnnnnnnnnnnnnnnnnnnnnnnnnnnnnnnnnnnnnnnnnnnnnnnnnnnnnnnnnnnnnnnnnnnnnnnnnnnnnnnnnnnnnnnnnnnnnnnnnnnnnnnnnnnnnnnnnnnnnnnnnnnnnnnnnnnnnnnnnnnnnnnnnnnnnnnnnnnnnnnnnnnnnnnnnnnnnnnnnnnnnnnnnnnnnnnnnnnnnnnnnnnnnnnnnnnnnnnnnnnnnnnnnnnnnnnnnnnnnnnnnnnnnnnnnnnnnnnnnnnnnnnnnnnnnnnnnnnnnnnnnnnnnnnnnnnnnnnnnnnnnnnnnnnnnnnnnnnnnnnnnnnnnnnnnnnnnnnnnnnnnnnnnnnnnnnnnnnnnnnnnnnnnnnnnnnnnnnnnnnnnnnnnnnnnnnnnnnnnnnnnnnnnnnnnnnnnnnnnnnnnnnnnnnnnnnnnnnnnnnnnnnnnnnnnnnnnnnnnnnnnnnnnnnnnnnnnnnnnnnnnnnnnnnnnnnnnnnnnnnnnnnnnnnnnnnnnnnnnnnnnnnnnnnnnnnnnnnnnnnnnnnnnnnnnnnnnnnnnnnnnnnnnnnnnnnnnnnnnnnnnnnnnnnnnnnnnnnnnnnnnnnnnnnnnnnnnnnnnnnnnnnnnnnnnnnnnnnnnnnnnnnnnnnnnnnnnnnnnnnnnnnnnnnnnnnnnnnnnnnnnnnnnnnnnnnnnnnnnnnnnnnnnnnnnnnnnnnnnnnnnnnnnnnnnnnnnnnnnnnnnnnnnnnnnnnnnnnnnnnnnnnnnnnnnnnnnnnnnnnnnnnnnnnnnnnnnnnnnnnnnnnnnnnnnnnnnnnnnnnnnnnnnnnnnnnnnnnnnnnnnnnnnnnnnnnnnnnnnnnnnnnnnnnnnnnnnnnnnnnnnnnnnnnnnnnnnnnnnnnnnnnnnnnnnnnnnnnnnnnnnnnnnnnnnnnnnnnnnnnnnnnnnnnnnnnnnnnnnnnnnnnnnnnnnnnnnnnnnnnnnnnnnnnnnnnnnnnnnnnnnnnnnnnnnnnnnnnnnnnnnnnnnnnnnnnnnnnnnnnnnnnnnnnnnnnnnnnnnnnnnnnnnnnnnnnnnnnnnnnnnnnnnnnnnnnnnnnnnnnnnnnnnnnnnnnnnnnnnnnnnnnnnnnnnnnnnnnnnnnnnnnnnnnnnnnnnnnnnnnnnnnnnnnnnnnnnnnnnnnnnnnnnnnnnnnnnnnnnnnnnnnnnnnnnnnnnnnnnnnnnnnnnnnnnnnnnnnnnnnnnnnnnnnnnnnnnnnnnnnnnnnnnnnnnnnnnnnnnnnnnnnnnnnnnnnnnnnnnnnnnnnnnnnnnnnnnnnnnnnnnnnnnnnnnnnnnnnnnnnnnnnnnnnnnnnnnnnnnnnnnnnnnnnnnnnnnnnnnnnnnnnnnnnnnnnnnnnnnnnnnnnnnnnnnnnnnnnnnnnnnnnnnnnnnnnnnnnnnnnnnnnnnnnnnnnnnnnnnnnnnnnnnnnnnnnnnnnnnnnnnnnnnnnnnnnnnnnnnnnnnnnnnnnnnnnnnnnnnnnnnnnnnnnnnnnnnnnnnnnnnnnnnnnnnnnnnnnnnnnnnnnnnnnnnnnnnnnnnnnnnnnnnnnnnnnnnnnnnnnnnnnnnnnnnnnnnnnnnnnnnnnnnnnnnnnnnnnnnnnnnnnnnnnnnnnnnnnnnnnnnnnnnnnnnnnnnnnnnnnnnnnnnnnnnnnnnnnnnnnnnnnnnnnnnnnnnnnnnnnnnnnnnnnnnnnnnnnnnnnnnnnnnnnnnnnnnnnnnnnnnnnnnnnnnnnnnnnnnnnnnnnnnnnnnnnnnnnnnnnnnnnnnnnnnnnnnnnnnnnnnnnnnnnnnnnnnnnnnnnnnnnnnnnnnnnnnnnnnnnnnnnnnnnnnnnnnnnnnnnnnnnnnnnnnnnnnnnnnnnnnnnnnnnnnnnnnnnnnnnnnnnnnnnnnnnnnnnnnnnnnnnnnnnnnnnnnnnnnnnnnnnnnnnnnnnnnnnnnnnnnnnnnnnnnnnnnnnnnnnnnnnnnnnnnnnnnnnnnnnnnnnnnnnnnnnnnnnnnnnnnnnnnnnnnnnnnnnnnnnnnnnnnnnnnnnnnnnnnnnnnnnnnnnnnnnnnnnnnnnnnnnnnnnnnnnnnnnnnnnnnnnnnnnnnnnnnnnnnnnnnnnnnnnnnnnnnnnnnnnnnnnnnnnnnnnnnnnnnnnnnnnnnnnnnnnnnnnnnnnnnnnnnnnnnnnnnnnnnnnnnnnnnnnnnnnnnnnnnnnnnnnnnnnnnnnnnnnnnnnnnnnnnnnnnnnnnnnnnnnnnnnnnnnnnnnnnnnnnnnnnnnnnnnnnnnnnnnnnnnnnnnnnnnnnnnnnnnnnnnnnnnnnnnnnnnnnnnnnnnnnnnnnnnnnnnnnnnnnnnnnnnnnnnnnnnnnnnnnnnnnnnnnnnnnnnnnnnnnnnnnnnnnnnnnnnnnnnnnnnnnnnnnnnnnnnnnnnnnnnnnnnnnnnnnnnnnnnnnnnnnnnnnnnnnnnnnnnnnnnnnnnnnnnnnnnnnnnnnnnnnnnnnnnnnnnnnnnnnnnnnnnnnnnnnnnnnnnnnnnnnnnnnnnnnnnnnnnnnnnnnnnnnnnnnnnnnnnnnnnnnnnnnnnnnnnnnnnnnnnnnnnnnnnnnnnnnnnnnnnnnnnnnnnnnnnnnnnnnnnnnnnnnnnnnnnnnnnnnnnnnnnnnnnnnnnnnnnnnnnnnnnnnnnnnnnnnnnnnnnnnnnnnnnnnnnnnnnnnnnnnnnnnnnnnnnnnnnnnnnnnnnnnnnnnnnnnnnnnnnnnnnnnnnnnnnnnnnnnnnnnnnnnnnnnnnnnnnnnnnnnnnnnnnnnnnnnnnnnnnnnnnnnnnnnnnnnnnnnnnnnnnnnnnnnnnnnnnnnnnnnnnnnnnnnnnnnnnnnnnnnnnnnnnnnnnnnnnnnnnnnnnnnnnnnnnnnnnnnnnnnnnnnnnnnnnnnnnnnnnnnnnnnnnnnnnnnnnnnnnnnnnnnnnnnnnnnnnnnnnnnnnnnnnnnnnnnnnnnnnnnnnnnnnnnnnnnnnnnnnnnnnnnnnnnnnnnnnnnnnnnnnnnnnnnnnnnnnnnnnnnnnnnnnnnnnnnnnnnnnnnnnnnnnnnnnnnnnnnnnnnnnnnnnnnnnnnnnnnnnnnnnnnnnnnnnnnnnnnnnnnnnnnnnnnnnnnnnnnnnnnnnnnnnnnnnnnnnnnnnnnnnnnnnnnnnnnnnnnnnnnnnnnnnnnnnnnnnnnnnnnnnnnnnnnnnnnnnnnnnnnnnnnnnnnnnnnnnnnnnnnnnnnnnnnnnnnnnnnnnnnnnnnnnnnnnnnnnnnnnnnnnnnnnnnnnnnnnnnnnnnnnnnnnnnnnnnnnnnnnnnnnnnnnnnnnnnnnnnnnnnnnnnnnnnnnnnnnnnnnnnnnnnnnnnnnnnnnnnnnnnnnnnnnnnnnnnnnnnnnnnnnnnnnnnnnnnnnnnnnnnnnnnnnnnnnnnnnnnnnnnnnnnnnnnnnnnnnnnnnnnnnnnnnnnnnnnnnnnnnnnnnnnnnnnnnnnnnnnnnnnnnnnnnnnnnnnnnnnnnnnnnnnnnnnnnnnnnnnnnnnnnnnnnnnnnnnnnnnnnnnnnnnnnnnnnnnnnnnnnnnnnnnnnnnnnnnnnnnnnnnnnnnnnnnnnnnnnnnnnnnnnnnnnnnnnnnnnnnnnnnnnnnnnnnnnnnnnnnnnnnnnnnnnnnnnnnnnnnnnnnnnnnnnnnnnnnnnnnnnnnnnnnnnnnnnnnnnnnnnnnnnnnnnnnnnnnnnnnnnnnnnnnnnnnnnnnnnnnnnnnnnnnnnnnnnnnnnnnnnnnnnnnnnnnnnnnnnnnnnnnnnnnnnnnnnnnnnnnnnnnnnnnnnnnnnnnnnnnnnnnnnnnnnnnnnnnnnnnnnnnnnnnnnnnnnnnnnnnnnnnnnnnnnnnnnnnnnnnnnnnnnnnnnnnnnnnnnnnnnnnnnnnnnnnnnnnnnnnnnnnnnnnnnnnnnnnnnnnnnnnnnnnnnnnnnnnnnnnnnnnnnnnnnnnnnnnnnnnnnnnnnnnnnnnnnnnnnnnnnnnnnnnnnnnnnnnnnnnnnnnnnnnnnnnnnnnnnnnnnnnnnnnnnnnnnnnnnnnnnnnnnnnnnnnnnnnnnnnnnnnnnnnnnnnnnnnnnnnnnnnnnnnnnnnnnnnnnnnnnnnnnnnnnnnnnnnnnnnnnnnnnnnnnnnnnnnnnnnnnnnnnnnnnnnnnnnnnnnnnnnnnnnnnnnnnnnnnnnnnnnnnnnnnnnnnnnnnnnnnnnnnnnnnnnnnnnnnnnnnnnnnnnnnnnnnnnnnnnnnnnnnnnnnnnnnnnnnnnnnnnnnnnnnnnnnnnnnnnnnnnnnnnnnnnnnnnnnnnnnnnnnnnnnnnnnnnnnnnnnnnnnnnnnnnnnnnnnnnnnnnnnnnnnnnnnnnnnnnnnnnnnnnnnnnnnnnnnnnnnnnnnnnnnnnnnnnnnnnnnnnnnnnnnnnnnnnnnnnnnnnnnnnnnnnnnnnnnnnnnnnnnnnnnnnnnnnnnnnnnnnnnnnnnnnnnnnnnnnnnnnnnnnnnnnnnnnnnnnnnnnnnnnnnnnnnnnnnnnnnnnnnnnnnnnnnnnnnnnnnnnnnnnnnnnnnnnnnnnnnnnnnnnnnnnnnnnnnnnnnnnnnnnnnnnnnnnnnnnnnnnnnnnnnnnnnnnnnnnnnnnnnnnnnnnnnnnnnnnnnnnnnnnnnnnnnnnnnnnnnnnnnnnnnnnnnnnnnnnnnnnnnnnnnnnnnnnnnnnnnnnnnnnnnnnnnnnnnnnnnnnnnnnnnnnnnnnnnnnnnnnnnnnnnnnnnnnnnnnnnnnnnnnnnnnnnnnnnnnnnnnnnnnnnnnnnnnnnnnnnnnnnnnnnnnnnnnnnnnnnnnnnnnnnnnnnnnnnnnnnnnnnnnnnnnnnnnnnnnnnnnnnnnnnnnnnnnnnnnnnnnnnnnnnnnnnnnnnnnnnnnnnnnnnnnnnnnnnnnnnnnnnnnnnnnnnnnnnnnnnnnnnnnnnnnnnnnnnnnnnnnnnnnnnnnnnnnnnnnnnnnnnnnnnnnnnnnnnnnnnnnnnnnnnnnnnnnnnnnnnnnnnnnnnnnnnnnnnnnnnnnnnnnnnnnnnnnnnnnnnnnnnnnnnnnnnnnnnnnnnnnnnnnnnnnnnnnnnnnnnnnnnnnnnnnnnnnnnnnnnnnnnnnnnnnnnnnnnnnnnnnnnnnnnnnnnnnnnnnnnnnnnnnnnnnnnnnnnnnnnnnnnnnnnnnnnnnnnnnnnnnnnnnnnnnnnnnnnnnnnnnnnnnnnnnnnnnnnnnnnnnnnnnnnnnnnnnnnnnnnnnnnnnnnnnnnnnnnnnnnnnnnnnnnnnnnnnnnnnnnnnnnnnnnnnnnnnnnnnnnnnnnnnnnnnnnnnnnnnnnnnnnnnnnnnnnnnnnnnnnnnnnnnnnnnnnnnnnnnnnnnnnnnnnnnnnnnnnnnnnnnnnnnnnnnnnnnnnnnnnnnnnnnnnnnnnnnnnnnnnnnnnnnnnnnnnnnnnnnnnnnnnnnnnnnnnnnnnnnnnnnnnnnnnnnnnnnnnnnnnnnnnnnnnnnnnnnnnnnnnnnnnnnnnnnnnnnnnnnnnnnnnnnnnnnnnnnnnnnnnnnnnnnnnnnnnnnnnnnnnnnnnnnnnnnnnnnnnnnnnnnnnnnnnnnnnnnnnnnnnnnnnnnnnnnnnnnnnnnnnnnnnnnnnnnnnnnnnnnnnnnnnnnnnnnnnnnnnnnnnnnnnnnnnnnnnnnnnnnnnnnnnnnnnnnnnnnnnnnnnnnnnnnnnnnnnnnnnnnnnnnnnnnnnnnnnnnnnnnnnnnnnnnnnnnnnnnnnnnnnnnnnnnnnnnnnnnnnnnnnnnnnnnnnnnnnnnnnnnnnnnnnnnnnnnnnnnnnnnnnnnnnnnnnnnnnnnnnnnnnnnnnnnnnnnnnnnnnnnnnnnnnnnnnnnnnnnnnnnnnnnnnnnnnnnnnnnnnnnnnnnnnnnnnnnnnnnnnnnnnnnnnnnnnnnnnnnnnnnnnnnnnnnnnnnnnnnnnnnnnnnnnnnnnnnnnnnnnnnnnnnnnnnnnnnnnnnnnnnnnnnnnnnnnnnnnnnnnnnnnnnnnnnnnnnnnnnnnnnnnnnnnnnnnnnnnnnnnnnnnnnnnnnnnnnnnnnnnnnnnnnnnnnnnnnnnnnnnnnnnnnnnnnnnnnnnnnnnnnnnnnnnnnnnnnnnnnnnnnnnnnnnnnnnnnnnnnnnnnnnnnnnnnnnnnnnnnnnnnnnnnnnnnnnnnnnnnnnnnnnnnnnnnnnnnnnnnnnnnnnnnnnnnnnnnnnnnnnnnnnnnnnnnnnnnnnnnnnnnnnnnnnnnnnnnnnnnnnnnnnnnnnnnnnnnnnnnnnnnnnnnnnnnnnnnnnnnnnnnnnnnnnnnnnnnnnnnnnnnnnnnnnnnnnnnnnnnnnnnnnnnnnnnnnnnnnnnnnnnnnnnnnnnnnnnnnnnnnnnnnnnnnnnnnnnnnnnnnnnnnnnnnnnnnnnnnnnnnnnnnnnnnnnnnnnnnnnnnnnnnnnnnnnnnnnnnnnnnnnnnnnnnnnnnnnnnnnnnnnnnnnnnnnnnnnnnnnnnnnnnnnnnnnnnnnnnnnnnnnnnnnnnnnnnnnnnnnnnnnnnnnnnnnnnnnnnnnnnnnnnnnnnnnnnnnnnnnnnnnnnnnnnnnnnnnnnnnnnnnnnnnnnnnnnnnnnnnnnnnnnnnnnnnnnnnnnnnnnnnnnnnnnnnnnnnnnnnnnnnnnnnnnnnnnnnnnnnnnnnnnnnnnnnnnnnnnnnnnnnnnnnnnnnnnnnnnnnnnnnnnnnnnnnnnnnnnnnnnnnnnnnnnnnnnnnnnnnnnnnnnnnnnnnnnnnnnnnnnnnnnnnnnnnnnnnnnnnnnnnnnnnnnnnnnnnnnnnnnnnnnnnnnnnnnnnnnnnnnnnnnnnnnnnnnnnnnnnnnnnnnnnnnnnnnnnnnnnnnnnnnnnnnnnnnnnnnnnnnnnnnnnnnnnnnnnnnnnnnnnnnnnnnnnnnnnnnnnnnnnnnnnnnnnnnnnnnnnnnnnnnnnnnnnnnnnnnnnnnnnnnnnnnnnnnnnnnnnnnnnnnnnnnnnnnnnnnnnnnnnnnnnnnnnnnnnnnnnnnnnnnnnnnnnnnnnnnnnnnnnnnnnnnnnnnnnnnnnnnnnnnnnnnnnnnnnnnnnnnnnnnnnnnnnnnnnnnnnnnnnnnnnnnnnnnnnnnnnnnnnnnnnnnnnnnnnnnnnnnnnnnnnnnnnnnnnnnnnnnnnnnnnnnnnnnnnnnnnnnnnnnnnnnnnnnnnnnnnnnnnnnnnnnnnnnnnnnnnnnnnnnnnnnnnnnnnnnnnnnnnnnnnnnnnnnnnnnnnnnnnnnnnnnnnnnnnnnnnnnnnnnnnnnnnnnnnnnnnnnnnnnnnnnnnnnnnnnnnnnnnnnnnnnnnnnnnnnnnnnnnnnnnnnnnnnnnnnnnnnnnnnnnnnnnnnnnnnnnnnnnnnnnnnnnnnnnnnnnnnnnnnnnnnnnnnnnnnnnnnnnnnnnnnnnnnnnnnnnnnnnnnnnnnnnnnnnnnnnnnnnnnnnnnnnnnnnnnnnnnnnnnnnnnnnnnnnnnnnnnnnnnnnnnnnnnnnnnnnnnnnnnnnnnnnnnnnnnnnnnnnnnnnnnnnnnnnnnnnnnnnnnnnnnnnnnnnnnnnnnnnnnnnnnnnnnnnnnnnnnnnnnnnnnnnnnnnnnnnnnnnnnnnnnnnnnnnnnnnnnnnnnnnnnnnnnnnnnnnnnnnnnnnnnnnnnnnnnnnnnnnnnnnnnnnnnnnnnnnnnnnnnnnnnnnnnnnnnnnnnnnnnnnnnnnnnnnnnnnnnnnnnnnnnnnnnnnnnnnnnnnnnnnnnnnnnnnnnnnnnnnnnnnnnnnnnnnnnnnnnnnnnnnnnnnnnnnnnnnnnnnnnnnnnnnnnnnnnnnnnnnnnnnnnnnnnnnnnnnnnnnnnnnnnnnnnnnnnnnnnnnnnnnnnnnnnnnnnnnnnnnnnnnnnnnnnnnnnnnnnnnnnnnnnnnnnnnnnnnnnnnnnnnnnnnnnnnnnnnnnnnnnnnnnnnnnnnnnnnnnnnnnnnnnnnnnnnnnnnnnnnnnnnnnnnnnnnnnnnnnnnnnnnnnnnnnnnnnnnnnnnnnnnnnnnnnnnnnnnnnnnnnnnnnnnnnnnnnnnnnnnnnnnnnnnnnnnnnnnnnnnnnnnnnnnnnnnnnnnnnnnnnnnnnnnnnnnnnnnnnnnnnnnnnnnnnnnnnnnnnnnnnnnnnnnnnnnnnnnnnnnnnnnnnnnnnnnnnnnnnnnnnnnnnnnnnnnnnnnnnnnnnnnnnnnnnnnnnnnnnnnnnnnnnnnnnnnnnnnnnnnnnnnnnnnnnnnnnnnnnnnnnnnnnnnnnnnnnnnnnnnnnnnnnnnnnnnnnnnnnnnnnnnnnnnnnnnnnnnnnnnnnnnnnnnnnnnnnnnnnnnnnnnnnnnnnnnnnnnnnnnnnnnnnnnnnnnnnnnnnnnnnnnnnnnnnnnnnnnnnnnnnnnnnnnnnnnnnnnnnnnnnnnnnnnnnnnnnnnnnnnnnnnnnnnnnnnnnnnnnnnnnnnnnnnnnnnnnnnnnnnnnnnnnnnnnnnnnnnnnnnnnnnnnnnnnnnnnnnnnnnnnnnnnnnnnnnnnnnnnnnnnnnnnnnnnnnnnnnnnnnnnnnnnnnnnnnnnnnnnnnnnnnnnnnnnnnnnnnnnnnnnnnnnnnnnnnnnnnnnnnnnnnnnnnnnnnnnnnnnnnnnnnnnnnnnnnnnnnnnnnnnnnnnnnnnnnnnnnnnnnnnnnnnnnnnnnnnnnnnnnnnnnnnnnnnnnnnnnnnnnnnnnnnnnnnnnnnnnnnnnnnnnnnnnnnnnnnnnnnnnnnnnnnnnnnnnnnnnnnnnnnnnnnnnnnnnnnnnnnnnnnnnnnnnnnnnnnnnnnnnnnnnnnnnnnnnnnnnnnnnnnnnnnnnnnnnnnnnnnnnnnnnnnnnnnnnnnnnnnnnnnnnnnnnnnnnnnnnnnnnnnnnnnnnnnnnnnnnnnnnnnnnnnnnnnnnnnnnnnnnnnnnnnnnnnnnnnnnnnnnnnnnnnnnnnnnnnnnnnnnnnnnnnnnnnnnnnnnnnnnnnnnnnnnnnnnnnnnnnnnnnnnnnnnnnnnnnnnnnnnnnnnnnnnnnnnnnnnnnnnnnnnnnnnnnnnnnnnnnnnnnnnnnnnnnnnnnnnnnnnnnnnnnnnnnnnnnnnnnnnnnnnnnnnnnnnnnnnnnnnnnnnnnnnnnnnnnnnnnnnnnnnnnnnnnnnnnnnnnnnnnnnnnnnnnnnnnnnnnnnnnnnnnnnnnnnnnnnnnnnnnnnnnnnnnnnnnnnnnnnnnnnnnnnnnnnnnnnnnnnnnnnnnnnnnnnnnnnnnnnnnnnnnnnnnnnnnnnnnnnnnnnnnnnnnnnnnnnnnnnnnnnnnnnnnnnnnnnnnnnnnnnnnnnnnnnnnnnnnnnnnnnnnnnnnnnnnnnnnnnnnnnnnnnnnnnnnnnnnnnnnnnnnnnnnnnnnnnnnnnnnnnnnnnnnnnnnnnnnnnnnnnnnnnnnnnnnnnnnnnnnnnnnnnnnnnnnnnnnnnnnnnnnnnnnnnnnnnnnnnnnnnnnnnnnnnnnnnnnnnnnnnnnnnnnnnnnnnnnnnnnnnnnnnnnnnnnnnnnnnnnnnnnnnnnnnnnnnnnnnnnnnnnnnnnnnnnnnnnnnnnnnnnnnnnnnnnnnnnnnnnnnnnnnnnnnnnnnnnnnnnnnnnnnnnnnnnnnnnnnnnnnnnnnnnnnnnnnnnnnnnnnnnnnnnnnnnnnnnnnnnnnnnnnnnnnnnnnnnnnnnnnnnnnnnnnnnnnnnnnnnnnnnnnnnnnnnnnnnnnnnnnnnnnnnnnnnnnnnnnnnnnnnnnnnnnnnnnnnnnnnnnnnnnnnnnnnnnnnnnnnnnnnnnnnnnnnnnnnnnnnnnnnnnnnnnnnnnnnnnnnnnnnnnnnnnnnnnnnnnnnnnnnnnnnnnnnnnnnnnnnnnnnnnnnnnnnnnnnnnnnnnnnnnnnnnnnnnnnnnnnnnnnnnnnnnnnnnnnnnnnnnnnnnnnnnnnnnnnnnnnnnnnnnnnnnnnnnnnnnnnnnnnnnnnnnnnnnnnnnnnnnnnnnnnnnnnnnnnnnnnnnnnnnnnnnnnnnnnnnnnnnnnnnnnnnnnnnnnnnnnnnnnnnnnnnnnnnnnnnnnnnnnnnnnnnnnnnnnnnnnnnnnnnnnnnnnnnnnnnnnnnnnnnnnnnnnnnnnnnnnnnnnnnnnnnnnnnnnnnnnnnnnnnnnnnnnnnnnnnnnnnnnnnnnnnnnnnnnnnnnnnnnnnnnnnnnnnnnnnnnnnnnnnnnnnnnnnnnnnnnnnnnnnnnnnnnnnnnnnnnnnnnnnnnnnnnnnnnnnnnnnnnnnnnnnnnnnnnnnnnnnnnnnnnnnnnnnnnnnnnnnnnnnnnnnnnnnnnnnnnnnnnnnnnnnnnnnnnnnnnnnnnnnnnnnnnnnnnnnnnnnnnnnnnnnnnnnnnnnnnnnnnnnnnnnnnnnnnnnnnnnnnnnnnnnnnnnnnnnnnnnnnnnnnnnnnnnnnnnnnnnnnnnnnnnnnnnnnnnnnnnnnnnnnnnnnnnnnnnnnnnnnnnnnnnnnnnnnnnnnnnnnnnnnnnnnnnnnnnnnnnnnnnnnnnnnnnnnnnnnnnnnnnnnnnnnnnnnnnnnnnnnnnnnnnnnnnnnnnnnnnnnnnnnnnnnnnnnnnnnnnnnnnnnnnnnnnnnnnnnnnnnnnnnnnnnnnnnnnnnnnnnnnnnnnnnnnnnnnnnnnnnnnnnnnnnnnnnnnnnnnnnnnnnnnnnnnnnnnnnnnnnnnnnnnnnnnnnnnnnnnnnnnnnnnnnnnnnnnnnnnnnnnnnnnnnnnnnnnnnnnnnnnnnnnnnnnnnnnnnnnnnnnnnnnnnnnnnnnnnnnnnnnnnnnnnnnnnnnnnnnnnnnnnnnnnnnnnnnnnnnnnnnnnnnnnnnnnnnnnnnnnnnnnnnnnnnnnnnnnnnnnnnnnnnnnnnnnnnnnnnnnnnnnnnnnnnnnnnnnnnnnnnnnnnnnnnnnnnnnnnnnnnnnnnnnnnnnnnnnnnnnnnnnnnnnnnnnnnnnnnnnnnnnnnnnnnnnnnnnnnnnnnnnnnnnnnnnnnnnnnnnnnnnnnnnnnnnnnnnnnnnnnnnnnnnnnnnnnnnnnnnnnnnnnnnnnnnnnnnnnnnnnnnnnnnnnnnnnnnnnnnnnnnnnnnnnnnnnnnnnnnnnnnnnnnnnnnnnnnnnnnnnnnnnnnnnnnnnnnnnnnnnnnnnnnnnnnnnnnnnnnnnnnnnnnnnnnnnnnnnnnnnnnnnnnnnnnnnnnnnnnnnnnnnnnnnnnnnnnnnnnnnnnnnnnnnnnnnnnnnnnnnnnnnnnnnnnnnnnnnnnnnnnnnnnnnnnnnnnnnnnnnnnnnnnnnnnnnnnnnnnnnnnnnnnnnnnnnnnnnnnnnnnnnnnnnnnnnnnnnnnnnnnnnnnnnnnnnnnnnnnnnnnnnnnnnnnnnnnnnnnnnnnnnnnnnnnnnnnnnnnnnnnnnnnnnnnnnnnnnnnnnnnnnnnnnnnnnnnnnnnnnnnnnnnnnnnnnnnnnnnnnnnnnnnnnnnnnnnnnnnnnnnnnnnnnnnnnnnnnnnnnnnnnnnnnnnnnnnnnnnnnnnnnnnnnnnnnnnnnnnnnnnnnnnnnnnnnnnnnnnnnnnnnnnnnnnnnnnnnnnnnnnnnnnnnnnnnnnnnnnnnnnnnnnnnnnnnnnnnnnnnnnnnnnnnnnnnnnnnnnnnnnnnnnnnnnnnnnnnnnnnnnnnnnnnnnnnnnnnnnnnnnnnnnnnnnnnnnnnnnnnnnnnnnnnnnnnnnnnnnnnnnnnnnnnnnnnnnnnnnnnnnnnnnnnnnnnnnnnnnnnnnnnnnnnnnnnnnnnnnnnnnnnnnnnnnnnnnnnnnnnnnnnnnnnnnnnnnnnnnnnnnnnnnnnnnnnnnnnnnnnnnnnnnnnnnnnnnnnnnnnnnnnnnnnnnnnnnnnnnnnnnnnnnnnnnnnnnnnnnnnnnnnnnnnnnnnnnnnnnnnnnnnnnnnnnnnnnnnnnnnnnnnnnnnnnnnnnnnnnnnnnnnnnnnnnnnnnnnnnnnnnnnnnnnnnnnnnnnnnnnnnnnnnnnnnnnnnnnnnnnnnnnnnnnnnnnnnnnnnnnnnnnnnnnnnnnnnnnnnnnnnnnnnnnnnnnnnnnnnnnnnnnnnnnnnnnnnnnnnnnnnnnnnnnnnnnnnnnnnnnnnnnnnnnnnnnnnnnnnnnnnnnnnnnnnnnnnnnnnnnnnnnnnnnnnnnnnnnnnnnnnnnnnnnnnnnnnnnnnnnnnnnnnnnnnnnnnnnnnnnnnnnnnnnnnnnnnnnnnnnnnnnnnnnnnnnnnnnnnnnnnnnnnnnnnnnnnnnnnnnnnnnnnnnnnnnnnnnnnnnnnnnnnnnnnnnnnnnnnnnnnnnnnnnnnnnnnnnnnnnnnnnnnnnnnnnnnnnnnnnnnnnnnnnnnnnnnnnnnnnnnnnnnnnnnnnnnnnnnnnnnnnnnnnnnnnnnnnnnnnnnnnnnnnnnnnnnnnnnnnnnnnnnnnnnnnnnnnnnnnnnnnnnnnnnnnnnnnnnnnnnnnnnnnnnnnnnnnnnnnnnnnnnnnnnnnnnnnnnnnnnnnnnnnnnnnnnnnnnnnnnnnnnnnnnnnnnnnnnnnnnnnnnnnnnnnnnnnnnnnnnnnnnnnnnnnnnnnnnnnnnnnnnnnnnnnnnnnnnnnnnnnnnnnnnnnnnnnnnnnnnnnnnnnnnnnnnnnnnnnnnnnnnnnnnnnnnnnnnnnnnnnnnnnnnnnnnnnnnnnnnnnnnnnnnnnnnnnnnnnnnnnnnnnnnnnnnnnnnnnnnnnnnnnnnnnnnnnnnnnnnnnnnnnnnnnnnnnnnnnnnnnnnnnnnnnnnnnnnnnnnnnnnnnnnnnnnnnnnnnnnnnnnnnnnnnnnnnnnnnnnnnnnnnnnnnnnnnnnnnnnnnnnnnnnnnnnnnnnnnnnnnnnnnnnnnnnnnnnnnnnnnnnnnnnnnnnnnnnnnnnnnnnnnnnnnnnnnnnnnnnnnnnnnnnnnnnnnnnnnnnnnnnnnnnnnnnnnnnnnnnnnnnnnnnnnnnnnnnnnnnnnnnnnnnnnnnnnnnnnnnnnnnnnnnnnnnnnnnnnnnnnnnnnnnnnnnnnnnnnnnnnnnnnnnnnnnnnnnnnnnnnnnnnnnnnnnnnnnnnnnnnnnnnnnnnnnnnnnnnnnnnnnnnnnnnnnnnnnnnnnnnnnnnnnnnnnnnnnnnnnnnnnnnnnnnnnnnnnnnnnnnnnnnnnnnnnnnnnnnnnnnnnnnnnnnnnnnnnnnnnnnnnnnnnnnnnnnnnnnnnnnnnnnnnnnnnnnnnnnnnnnnnnnnnnnnnnnnnnnnnnnnnnnnnnnnnnnnnnnnnnnnnnnnnnnnnnnnnnnnnnnnnnnnnnnnnnnnnnnnnnnnnnnnnnnnnnnnnnnnnnnnnnnnnnnnnnnnnnnnnnnnnnnnnnnnnnnnnnnnnnnnnnnnnnnnnnnnnnnnnnnnnnnnnnnnnnnnnnnnnnnnnnnnnnnnnnnnnnnnnnnnnnnnnnnnnnnnnnnnnnnnnnnnnnnnnnnnnnnnnnnnnnnnnnnnnnnnnnnnnnnnnnnnnnnnnnnnnnnnnnnnnnnnnnnnnnnnnnnnnnnnnnnnnnnnnnnnnnnnnnnnnnnnnnnnnnnnnnnnnnnnnnnnnnnnnnnnnnnnnnnnnnnnnnnnnnnnnnnnnnnnnnnnnnnnnnnnnnnnnnnnnnnnnnnnnnnnnnnnnnnnnnnnnnnnnnnnnnnnnnnnnnnnnnnnnnnnnnnnnnnnnnnnnnnnnnnnnnnnnnnnnnnnnnnnnnnnnnnnnnnnnnnnnnnnnnnnnnnnnnnnnnnnnnnnnnnnnnnnnnnnnnnnnnnnnnnnnnnnnnnnnnnnnnnnnnnnnnnnnnnnnnnnnnnnnnnnnnnnnnnnnnnnnnnnnnnnnnnnnnnnnnnnnnnnnnnnnnnnnnnnnnnnnnnnnnnnnnnnnnnnnnnnnnnnnnnnnnnnnnnnnnnnnnnnnnnnnnnnnnnnnnnnnnnnnnnnnnnnnnnnnnnnnnnnnnnnnnnnnnnnnnnnnnnnnnnnnnnnnnnnnnnnnnnnnnnnnnnnnnnnnnnnnnnnnnnnnnnnnnnnnnnnnnnnnnnnnnnnnnnnnnnnnnnnnnnnnnnnnnnnnnnnnnnnnnnnnnnnnnnnnnnnnnnnnnnnnnnnnnnnnnnnnnnnnnnnnnnnnnnnnnnnnnnnnnnnnnnnnnnnnnnnnnnnnnnnnnnnnnnnnnnnnnnnnnnnnnnnnnnnnnnnnnnnnnnnnnnnnnnnnnnnnnnnnnnnnnnnnnnnnnnnnnnnnnnnnnnnnnnnnnnnnnnnnnnnnnnnnnnnnnnnnnnnnnnnnnnnnnnnnnnnnnnnnnnnnnnnnnnnnnnnnnnnnnnnnnnnnnnnnnnnnnnnnnnnnnnnnnnnnnnnnnnnnnnnnnnnnnnnnnnnnnnnnnnnnnnnnnnnnnnnnnnnnnnnnnnnnnnnnnnnnnnnnnnnnnnnnnnnnnnnnnnnnnnnnnnnnnnnnnnnnnnnnnnnnnnnnnnnnnnnnnnnnnnnnnnnnnnnnnnnnnnnnnnnnnnnnnnnnnnnnnnnnnnnnnnnnnnnnnnnnnnnnnnnnnnnnnnnnnnnnnnnnnnnnnnnnnnnnnnnnnnnnnnnnnnnnnnnnnnnnnnnnnnnnnnnnnnnnnnnnnnnnnnnnnnnnnnnnnnnnnnnnnnnnnnnnnnnnnnnnnnnnnnnnnnnnnnnnnnnnnnnnnnnnnnnnnnnnnnnnnnnnnnnnnnnnnnnnnnnnnnnnnnnnnnnnnnnnnnnnnnnnnnnnnnnnnnnnnnnnnnnnnnnnnnnnnnnnnnnnnnnnnnnnnnnnnnnnnnnnnnnnnnnnnnnnnnnnnnnnnnnnnnnnnnnnnnnnnnnnnnnnnnnnnnnnnnnnnnnnnnnnnnnnnnnnnnnnnnnnnnnnnnnnnnnnnnnnnnnnnnnnnnnnnnnnnnnnnnnnnnnnnnnnnnnnnnnnnnnnnnnnnnnnnnnnnnnnnnnnnnnnnnnnnnnnnnnnnnnnnnnnnnnnnnnnnnnnnnnnnnnnnnnnnnnnnnnnnnnnnnnnnnnnnnnnnnnnnnnnnnnnnnnnnnnnnnnnnnnnnnnnnnnnnnnnnnnnnnnnnnnnnnnnnnnnnnnnnnnnnnnnnnnnnnnnnnnnnnnnnnnnnnnnnnnnnnnnnnnnnnnnnnnnnnnnnnnnnnnnnnnnnnnnnnnnnnnnnnnnnnnnnnnnnnnnnnnnnnnnnnnnnnnnnnnnnnnnnnnnnnnnnnnnnnnnnnnnnnnnnnnnnnnnnnnnnnnnnnnnnnnnnnnnnnnnnnnnnnnnnnnnnnnnnnnnnnnnnnnnnnnnnnnnnnnnnnnnnnnnnnnnnnnnnnnnnnnnnnnnnnnnnnnnnnnnnnnnnnnnnnnnnnnnnnnnnnnnnnnnnnnnnnnnnnnnnnnnnnnnnnnnnnnnnnnnnnnnnnnnnnnnnnnnnnnnnnnnnnnnnnnnnnnnnnnnnnnnnnnnnnnnnnnnnnnnnnnnnnnnnnnnnnnnnnnnnnnnnnnnnnnnnnnnnnnnnnnnnnnnnnnnnnnnnnnnnnnnnnnnnnnnnnnnnnnnnnnnnnnnnnnnnnnnnnnnnnnnnnnnnnnnnnnnnnnnnnnnnnnnnnnnnnnnnnnnnnnnnnnnnnnnnnnnnnnnnnnnnnnnnnnnnnnnnnnnnnnnnnnnnnnnnnnnnnnnnnnnnnnnnnnnnnnnnnnnnnnnnnnnnnnnnnnnnnnnnnnnnnnnnnnnnnnnnnnnnnnnnnnnnnnnnnnnnnnnnnnnnnnnnnnnnnnnnnnnnnnnnnnnnnnnnnnnnnnnnnnnnnnnnnnnnnnnnnnnnnnnnnnnnnnnnnnnnnnnnnnnnnnnnnnnnnnnnnnnnnnnnnnnnnnnnnnnnnnnnnnnnnnnnnnnnnnnnnnnnnnnnnnnnnnnnnnnnnnnnnnnnnnnnnnnnnnnnnnnnnnnnnnnnnnnnnnnnnnnnnnnnnnnnnnnnnnnnnnnnnnnnnnnnnnnnnnnnnnnnnnnnnnnnnnnnnnnnnnnnnnnnnnnnnnnnnnnnnnnnnnnnnnnnnnnnnnnnnnnnnnnnnnnnnnnnnnnnnnnnnnnnnnnnnnnnnnnnnnnnnnnnnnnnnnnnnnnnnnnnnnnnnnnnnnnnnnnnnnnnnnnnnnnnnnnnnnnnnnnnnnnnnnnnnnnnnnnnnnnnnnnnnnnnnnnnnnnnnnnnnnnnnnnnnnnnnnnnnnnnnnnnnnnnnnnnnnnnnnnnnnnnnnnnnnnnnnnnnnnnnnnnnnnnnnnnnnnnnnnnnnnnnnnnnnnnnnnnnnnnnnnnnnnnnnnnnnnnnnnnnnnnnnnnnnnnnnnnnnnnnnnnnnnnnnnnnnnnnnnnnnnnnnnnnnnnnnnnnnnnnnnnnnnnnnnnnnnnnnnnnnnnnnnnnnnnnnnnnnnnnnnnnnnnnnnnnnnnnnnnnnnnnnnnnnnnnnnnnnnnnnnnnnnnnnnnnnnnnnnnnnnnnnnnnnnnnnnnnnnnnnnnnnnnnnnnnnnnnnnnnnnnnnnnnnnnnnnnnnnnnnnnnnnnnnnnnnnnnnnnnnnnnnnnnnnnnnnnnnnnnnnnnnnnnnnnnnnnnnnnnnnnnnnnnnnnnnnnnnnnnnnnnnnnnnnnnnnnnnnnnnnnnnnnnnnnnnnnnnnnnnnnnnnnnnnnnnnnnnnnnnnnnnnnnnnnnnnnnnnnnnnnnnnnnnnnnnnnnnnnnnnnnnnnnnnnnnnnnnnnnnnnnnnnnnnnnnnnnnnnnnnnnnnnnnnnnnnnnnnnnnnnnnnnnnnnnnnnnnnnnnnnnnnnnnnnnnnnnnnnnnnnnnnnnnnnnnnnnnnnnnnnnnnnnnnnnnnnnnnnnnnnnnnnnnnnnnnnnnnnnnnnnnnnnnnnnnnnnnnnnnnnnnnnnnnnnnnnnnnnnnnnnnnnnnnnnnnnnnnnnnnnnnnnnnnnnnnnnnnnnnnnnnnnnnnnnnnnnnnnnnnnnnnnnnnnnnnnnnnnnnnnnnnnnnnnnnnnnnnnnnnnnnnnnnnnnnnnnnnnnnnnnnnnnnnnnnnnnnnnnnnnnnnnnnnnnnnnnnnnnnnnnnnnnnnnnnnnnnnnnnnnnnnnnnnnnnnnnnnnnnnnnnnnnnnnnnnnnnnnnnnnnnnnnnnnnnnnnnnnnnnnnnnnnnnnnnnnnnnnnnnnnnnnnnnnnnnnnnnnnnnnnnnnnnnnnnnnnnnnnnnnnnnnnnnnnnnnnnnnnnnnnnnnnnnnnnnnnnnnnnnnnnnnnnnnnnnnnnnnnnnnnnnnnnnnnnnnnnnnnnnnnnnnnnnnnnnnnnnnnnnnnnnnnnnnnnnnnnnnnnnnnnnnnnnnnnnnnnnnnnnnnnnnnnnnnnnnnnnnnnnnnnnnnnnnnnnnnnnnnnnnnnnnnnnnnnnnnnnnnnnnnnnnnnnnnnnnnnnnnnnnnnnnnnnnnnnnnnnnnnnnnnnnnnnnnnnnnnnnnnnnnnnnnnnnnnnnnnnnnnnnnnnnnnnnnnnnnnnnnnnnnnnnnnnnnnnnnnnnnnnnnnnnnnnnnnnnnnnnnnnnnnnnnnnnnnnnnnnnnnnnnnnnnnnnnnnnnnnnnnnnnnnnnnnnnnnnnnnnnnnnnnnnnnnnnnnnnnnnnnnnnnnnnnnnnnnnnnnnnnnnnnnnnnnnnnnnnnnnnnnnnnnnnnnnnnnnnnnnnnnnnnnnnnnnnnnnnnnnnnnnnnnnnnnnnnnnnnnnnnnnnnnnnnnnnnnnnnnnnnnnnnnnnnnnnnnnnnnnnnnnnnnnnnnnnnnnnnnnnnnnnnnnnnnnnnnnnnnnnnnnnnnnnnnnnnnnnnnnnnnnnnnnnnnnnnnnnnnnnnnnnnnnnnnnnnnnnnnnnnnnnnnnnnnnnnnnnnnnnnnnnnnnnnnnnnnnnnnnnnnnnnnnnnnnnnnnnnnnnnnnnnnnnnnnnnnnnnnnnnnnnnnnnnnnnnnnnnnnnnnnnnnnnnnnnnnnnnnnnnnnnnnnnnnnnnnnnnnnnnnnnnnnnnnnnnnnnnnnnnnnnnnnnnnnnnnnnnnnnnnnnnnnnnnnnnnnnnnnnnnnnnnnnnnnnnnnnnnnnnnnnnnnnnnnnnnnnnnnnnnnnnnnnnnnnnnnnnnnnnnnnnnnnnnnnnnnnnnnnnnnnnnnnnnnnnnnnnnnnnnnnnnnnnnnnnnnnnnnnnnnnnnnnnnnnnnnnnnnnnnnnnnnnnnnnnnnnnnnnnnnnnnnnnnnnnnnnnnnnnnnnnnnnnnnnnnnnnnnnnnnnnnnnnnnnnnnnnnnnnnnnnnnnnnnnnnnnnnnnnnnnnnnnnnnnnnnnnnnnnnnnnnnnnnnnnnnnnnnnnnnnnnnnnnnnnnnnnnnnnnnnnnnnnnnnnnnnnnnnnnnnnnnnnnnnnnnnnnnnnnnnnnnnnnnnnnnnnnnnnnnnnnnnnnnnnnnnnnnnnnnnnnnnnnnnnnnnnnnnnnnnnnnnnnnnnnnnnnnnnnnnnnnnnnnnnnnnnnnnnnnnnnnnnnnnnnnnnnnnnnnnnnnnnnnnnnnnnnnnnnnnnnnnnnnnnnnnnnnnnnnnnnnnnnnnnnnnnnnnnnnnnnnnnnnnnnnnnnnnnnnnnnnnnnnnnnnnnnnnnnnnnnnnnnnnnnnnnnnnnnnnnnnnnnnnnnnnnnnnnnnnnnnnnnnnnnnnnnnnnnnnnnnnnnnnnnnnnnnnnnnnnnnnnnnnnnnnnnnnnnnnnnnnnnnnnnnnnnnnnnnnnnnnnnnnnnnnnnnnnnnnnnnnnnnnnnnnnnnnnnnnnnnnnnnnnnnnnnnnnnnnnnnnnnnnnnnnnnnnnnnnnnnnnnnnnnnnnnnnnnnnnnnnnnnnnnnnnnnnnnnnnnnnnnnnnnnnnnnnnnnnnnnnnnnnnnnnnnnnnnnnnnnnnnnnnnnnnnnnnnnnnnnnnnnnnnnnnnnnnnnnnnnnnnnnnnnnnnnnnnnnnnnnnnnnnnnnnnnnnnnnnnnnnnnnnnnnnnnnnnnnnnnnnnnnnnnnnnnnnnnnnnnnnnnnnnnnnnnnnnnnnnnnnnnnnnnnnnnnnnnnnnnnnnnnnnnnnnnnnnnnnnnnnnnnnnnnnnnnnnnnnnnnnnnnnnnnnnnnnnnnnnnnnnnnnnnnnnnnnnnnnnnnnnnnnnnnnnnnnnnnnnnnnnnnnnnnnnnnnnnnnnnnnnnnnnnnnnnnnnnnnnnnnnnnnnnnnnnnnnnnnnnnnnnnnnnnnnnnnnnnnnnnnnnnnnnnnnnnnnnnnnnnnnnnnnnnnnnnnnnnnnnnnnnnnnnnnnnnnnnnnnnnnnnnnnnnnnnnnnnnnnnnnnnnnnnnnnnnnnnnnnnnnnnnnnnnnnnnnnnnnnnnnnnnnnnnnnnnnnnnnnnnnnnnnnnnnnnnnnnnnnnnnnnnnnnnnnnnnnnnnnnnnnnnnnnnnnnnnnnnnnnnnnnnnnnnnnnnnnnnnnnnnnnnnnnnnnnnnnnnnnnnnnnnnnnnnnnnnnnnnnnnnnnnnnnnnnnnnnnnnnnnnnnnnnnnnnnnnnnnnnnnnnnnnnnnnnnnnnnnnnnnnnnnnnnnnnnnnnnnnnnnnnnnnnnnnnnnnnnnnnnnnnnnnnnnnnnnnnnnnnnnnnnnnnnnnnnnnnnnnnnnnnnnnnnnnnnnnnnnnnnnnnnnnnnnnnnnnnnnnnnnnnnnnnnnnnnnnnnnnnnnnnnnnnnnnnnnnnnnnnnnnnnnnnnnnnnnnnnnnnnnnnnnnnnnnnnnnnnnnnnnnnnnnnnnnnnnnnnnnnnnnnnnnnnnnnnnnnnnnnnnnnnnnnnnnnnnnnnnnnnnnnnnnnnnnnnnnnnnnnnnnnnnnnnnnnnnnnnnnnnnnnnnnnnnnnnnnnnnnnnnnnnnnnnnnnnnnnnnnnnnnnnnnnnnnnnnnnnnnnnnnnnnnnnnnnnnnnnnnnnnnnnnnnnnnnnnnnnnnnnnnnnnnnnnnnnnnnnnnnnnnnnnnnnnnnnnnnnnnnnnnnnnnnnnnnnnnnnnnnnnnnnnnnnnnnnnnnnnnnnnnnnnnnnnnnnnnnnnnnnnnnnnnnnnnnnnnnnnnnnnnnnnnnnnnnnnnnnnnnnnnnnnnnnnnnnnnnnnnnnnnnnnnnnnnnnnnnnnnnnnnnnnnnnnnnnnnnnnnnnnnnnnnnnnnnnnnnnnnnnnnnnnnnnnnnnnnnnnnnnnnnnnnnnnnnnnnnnnnnnnnnnnnnnnnnnnnnnnnnnnnnnnnnnnnnnnnnnnnnnnnnnnnnnnnnnnnnnnnnnnnnnnnnnnnnnnnnnnnnnnnnnnnnnnnnnnnnnnnnnnnnnnnnnnnnnnnnnnnnnnnnnnnnnnnnnnnnnnnnnnnnnnnnnnnnnnnnnnnnnnnnnnnnnnnnnnnnnnnnnnnnnnnnnnnnnnnnnnnnnnnnnnnnnnnnnnnnnnnnnnnnnnnnnnnnnnnnnnnnnnnnnnnnnnnnnnnnnnnnnnnnnnnnnnnnnnnnnnnnnnnnnnnnnnnnnnnnnnnnnnnnnnnnnnnnnnnnnnnnnnnnnnnnnnnnnnnnnnnnnnnnnnnnnnnnnnnnnnnnnnnnnnnnnnnnnnnnnnnnnnnnnnnnnnnnnnnnnnnnnnnnnnnnnnnnnnnnnnnnnnnnnnnnnnnnnnnnnnnnnnnnnnnnnnnnnnnnnnnnnnnnnnnnnnnnnnnnnnnnnnnnnnnnnnnnnnnnnnnnnnnnnnnnnnnnnnnnnnnnnnnnnnnnnnnnnnnnnnnnnnnnnnnnnnnnnnnnnnnnnnnnnnnnnnnnnnnnnnnnnnnnnnnnnnnnnnnnnnnnnnnnnnnnnnnnnnnnnnnnnnnnnnnnnnnnnnnnnnnnnnnnnnnnnnnnnnnnnnnnnnnnnnnnnnnnnnnnnnnnnnnnnnnnnnnnnnnnnnnnnnnnnnnnnnnnnnnnnnnnnnnnnnnnnnnnnnnnnnnnnnnnnnnnnnnnnnnnnnnnnnnnnnnnnnnnnnnnnnnnnnnnnnnnnnnnnnnnnnnnnnnnnnnnnnnnnnnnnnnnnnnnnnnnnnnnnnnnnnnnnnnnnnnnnnnnnnnnnnnnnnnnnnnnnnnnnnnnnnnnnnnnnnnnnnnnnnnnnnnnnnnnnnnnnnnnnnnnnnnnnnnnnnnnnnnnnnnnnnnnnnnnnnnnnnnnnnnnnnnnnnnnnnnnnnnnnnnnnnnnnnnnnnnnnnnnnnnnnnnnnnnnnnnnnnnnnnnnnnnnnnnnnnnnnnnnnnnnnnnnnnnnnnnnnnnnnnnnnnnnnnnnnnnnnnnnnnnnnnnnnnnnnnnnnnnnnnnnnnnnnnnnnnnnnnnnnnnnnnnnnnnnnnnnnnnnnnnnnnnnnnnnnnnnnnnnnnnnnnnnnnnnnnnnnnnnnnnnnnnnnnnnnnnnnnnnnnnnnnnnnnnnnnnnnnnnnnnnnnnnnnnnnnnnnnnnnnnnnnnnnnnnnnnnnnnnnnnnnnnnnnnnnnnnnnnnnnnnnnnnnnnnnnnnnnnnnnnnnnnnnnnnnnnnnnnnnnnnnnnnnnnnnnnnnnnnnnnnnnnnnnnnnnnnnnnnnnnnnnnnnnnnnnnnnnnnnnnnnnnnnnnnnnnnnnnnnnnnnnnnnnnnnnnnnnnnnnnnnnnnnnnnnnnnnnnnnnnnnnnnnnnnnnnnnnnnnnnnnnnnnnnnnnnnnnnnnnnnnnnnnnnnnnnnnnnnnnnnnnnnnnnnnnnnnnnnnnnnnnnnnnnnnnnnnnnnnnnnnnnnnnnnnnnnnnnnnnnnnnnnnnnnnnnnnnnnnnnnnnnnnnnnnnnnnnnnnnnnnnnnnnnnnnnnnnnnnnnnnnnnnnnnnnnnnnnnnnnnnnnnnnnnnnnnnnnnnnnnnnnnnnnnnnnnnnnnnnnnnnnnnnnnnnnnnnnnnnnnnnnnnnnnnnnnnnnnnnnnnnnnnnnnnnnnnnnnnnnnnnnnnnnnnnnnnnnnnnnnnnnnnnnnnnnnnnnnnnnnnnnnnnnnnnnnnnnnnnnnnnnnnnnnnnnnnnnnnnnnnnnnnnnnnnnnnnnnnnnnnnnnnnnnnnnnnnnnnnnnnnnnnnnnnnnnnnnnnnnnnnnnnnnnnnnnnnnnnnnnnnnnnnnnnnnnnnnnnnnnnnnnnnnnnnnnnnnnnnnnnnnnnnnnnnnnnnnnnnnnnnnnnnnnnnnnnnnnnnnnnnnnnnnnnnnnnnnnnnnnnnnnnnnnnnnnnnnnnnnnnnnnnnnnnnnnnnnnnnnnnnnnnnnnnnnnnnnnnnnnnnnnnnnnnnnnnnnnnnnnnnnnnnnnnnnnnnnnnnnnnnnnnnnnnnnnnnnnnnnnnnnnnnnnnnnnnnnnnnnnnnnnnnnnnnnnnnnnnnnnnnnnnnnnnnnnnnnnnnnnnnnnnnnnnnnnnnnnnnnnnnnnnnnnnnnnnnnnnnnnnnnnnnnnnnnnnnnnnnnnnnnnnnnnnnnnnnnnnnnnnnnnnnnnnnnnnnnnnnnnnnnnnnnnnnnnnnnnnnnnnnnnnnnnnnnnnnnnnnnnnnnnnnnnnnnnnnnnnnnnnnnnnnnnnnnnnnnnnnnnnnnnnnnnnnnnnnnnnnnnnnnnnnnnnnnnnnnnnnnnnnnnnnnnnnnnnnnnnnnnnnnnnnnnnnnnnnnnnnnnnnnnnnnnnnnnnnnnnnnnnnnnnnnnnnnnnnnnnnnnnnnnnnnnnnnnnnnnnnnnnnnnnnnnnnnnnnnnnnnnnnnnnnnnnnnnnnnnnnnnnnnnnnnnnnnnnnnnnnnnnnnnnnnnnnnnnnnnnnnnnnnnnnnnnnnnnnnnnnnnnnnnnnnnnnnnnnnnnnnnnnnnnnnnnnnnnnnnnnnnnnnnnnnnnnnnnnnnnnnnnnnnnnnnnnnnnnnnnnnnnnnnnnnnnnnnnnnnnnnnnnnnnnnnnnnnnnnnnnnnnnnnnnnnnnnnnnnnnnnnnnnnnnnnnnnnnnnnnnnnnnnnnnnnnnnnnnnnnnnnnnnnnnnnnnnnnnnnnnnnnnnnnnnnnnnnnnnnnnnnnnnnnnnnnnnnnnnnnnnnnnnnnnnnnnnnnnnnnnnnnnnnnnnnnnnnnnnnnnnnnnnnnnnnnnnnnnnnnnnnnnnnnnnnnnnnnnnnnnnnnnnnnnnnnnnnnnnnnnnnnnnnnnnnnnnnnnnnnnnnnnnnnnnnnnnnnnnnnnnnnnnnnnnnnnnnnnnnnnnnnnnnnnnnnnnnnnnnnnnnnnnnnnnnnnnnnnnnnnnnnnnnnnnnnnnnnnnnnnnnnnnnnnnnnnnnnnnnnnnnnnnnnnnnnnnnnnnnnnnnnnnnnnnnnnnnnnnnnnnnnnnnnnnnnnnnnnnnnnnnnnnnnnnnnnnnnnnnnnnnnnnnnnnnnnnnnnnnnnnnnnnnnnnnnnnnnnnnnnnnnnnnnnnnnnnnnnnnnnnnnnnnnnnnnnnnnnnnnnnnnnnnnnnnnnnnnnnnnnnnnnnnnnnnnnnnnnnnnnnnnnnnnnnnnnnnnnnnnnnnnnnnnnnnnnnnnnnnnnnnnnnnnnnnnnnnnnnnnnnnnnnnnnnnnnnnnnnnnnnnnnnnnnnnnnnnnnnnnnnnnnnnnnnnnnnnnnnnnnnnnnnnnnnnnnnnnnnnnnnnnnnnnnnnnnnnnnnnnnnnnnnnnnnnnnnnnnnnnnnnnnnnnnnnnnnnnnnnnnnnnnnnnnnnnnnnnnnnnnnnnnnnnnnnnnnnnnnnnnnnnnnnnnnnnnnnnnnnnnnnnnnnnnnnnnnnnnnnnnnnnnnnnnnnnnnnnnnnnnnnnnnnnnnnnnnnnnnnnnnnnnnnnnnnnnnnnnnnnnnnnnnnnnnnnnnnnnnnnnnnnnnnnnnnnnnnnnnnnnnnnnnnnnnnnnnnnnnnnnnnnnnnnnnnnnnnnnnnnnnnnnnnnnnnnnnnnnnnnnnnnnnnnnnnnnnnnnnnnnnnnnnnnnnnnnnnnnnnnnnnnnnnnnnnnnnnnnnnnnnnnnnnnnnnnnnnnnnnnnnnnnnnnnnnnnnnnnnnnnnnnnnnnnnnnnnnnnnnnnnnnnnnnnnnnnnnnnnnnnnnnnnnnnnnnnnnnnnnnnnnnnnnnnnnnnnnnnnnnnnnnnnnnnnnnnnnnnnnnnnnnnnnnnnnnnnnnnnnnnnnnnnnnnnnnnnnnnnnnnnnnnnnnnnnnnnnnnnnnnnnnnnnnnnnnnnnnnnnnnnnnnnnnnnnnnnnnnnnnnnnnnnnnnnnnnnnnnnnnnnnnnnnnnnnnnnnnnnnnnnnnnnnnnnnnnnnnnnnnnnnnnnnnnnnnnnnnnnnnnnnnnnnnnnnnnnnnnnnnnnnnnnnnnnnnnnnnnnnnnnnnnnnnnnnnnnnnnnnnnnnnnnnnnnnnnnnnnnnnnnnnnnnnnnnnnnnnnnnnnnnnnnnnnnnnnnnnnnnnnnnnnnnnnnnnnnnnnnnnnnnnnnnnnnnnnnnnnnnnnnnnnnnnnnnnnnnnnnnnnnnnnnnnnnnnnnnnnnnnnnnnnnnnnnnnnnnnnnnnnnnnnnnnnnnnnnnnnnnnnnnnnnnnnnnnnnnnnnnnnnnnnnnnnnnnnnnnnnnnnnnnnnnnnnnnnnnnnnnnnnnnnnnnnnnnnnnnnnnnnnnnnnnnnnnnnnnnnnnnnnnnnnnnnnnnnnnnnnnnnnnnnnnnnnnnnnnnnnnnnnnnnnnnnnnnnnnnnnnnnnnnnnnnnnnnnnnnnnnnnnnnnnnnnnnnnnnnnnnnnnnnnnnnnnnnnnnnnnnnnnnnnnnnnnnnnnnnnnnnnnnnnnnnnnnnnnnnnnnnnnnnnnnnnnnnnnnnnnnnnnnnnnnnnnnnnnnnnnnnnnnnnnnnnnnnnnnnnnnnnnnnnnnnnnnnnnnnnnnnnnnnnnnnnnnnnnnnnnnnnnnnnnnnnnnnnnnnnnnnnnnnnnnnnnnnnnnnnnnnnnnnnnnnnnnnnnnnnnnnnnnnnnnnnnnnnnnnnnnnnnnnnnnnnnnnnnnnnnnnnnnnnnnnnnnnnnnnnnnnnnnnnnnnnnnnnnnnnnnnnnnnnnnnnnnnnnnnnnnnnnnnnnnnnnnnnnnnnnnnnnnnnnnnnnnnnnnnnnnnnnnnnnnnnnnnnnnnnnnnnnnnnnnnnnnnnnnnnnnnnnnnnnnnnnnnnnnnnnnnnnnnnnnnnnnnnnnnnnnnnnnnnnnnnnnnnnnnnnnnnnnnnnnnnnnnnnnnnnnnnnnnnnnnnnnnnnnnnnnnnnnnnnnnnnnnnnnnnnnnnnnnnnnnnnnnnnnnnnnnnnnnnnnnnnnnnnnnnnnnnnnnnnnnnnnnnnnnnnnnnnnnnnnnnnnnnnnnnnnnnnnnnnnnnnnnnnnnnnnnnnnnnnnnnnnnnnnnnnnnnnnnnnnnnnnnnnnnnnnnnnnnnnnnnnnnnnnnnnnnnnnnnnnnnnnnnnnnnnnnnnnnnnnnnnnnnnnnnnnnnnnnnnnnnnnnnnnnnnnnnnnnnnnnnnnnnnnnnnnnnnnnnnnnnnnnnnnnnnnnnnnnnnnnnnnnnnnnnnnnnnnnnnnnnnnnnnnnnnnnnnnnnnnnnnnnnnnnnnnnnnnnnnnnnnnnnnnnnnnnnnnnnnnnnnnnnnnnnnnnnnnnnnnnnnnnnnnnnnnnnnnnnnnnnnnnnnnnnnnnnnnnnnnnnnnnnnnnnnnnnnnnnnnnnnnnnnnnnnnnnnnnnnnnnnnnnnnnnnnnnnnnnnnnnnnnnnnnnnnnnnnnnnnnnnnnnnnnnnnnnnnnnnnnnnnnnnnnnnnnnnnnnnnnnnnnnnnnnnnnnnnnnnnnnnnnnnnnnnnnnnnnnnnnnnnnnnnnnnnnnnnnnnnnnnnnnnnnnnnnnnnnnnnnnnnnnnnnnnnnnnnnnnnnnnnnnnnnnnnnnnnnnnnnnnnnnnnnnnnnnnnnnnnnnnnnnnnnnnnnnnnnnnnnnnnnnnnnnnnnnnnnnnnnnnnnnnnnnnnnnnnnnnnnnnnnnnnnnnnnnnnnnnnnnnnnnnnnnnnnnnnnnnnnnnnnnnnnnnnnnnnnnnnnnnnnnnnnnnnnnnnnnnnnnnnnnnnnnnnnnnnnnnnnnnnnnnnnnnnnnnnnnnnnnnnnnnnnnnnnnnnnnnnnnnnnnnnnnnnnnnnnnnnnnnnnnnnnnnnnnnnnnnnnnnnnnnnnnnnnnnnnnnnnnnnnnnnnnnnnnnnnnnnnnnnnnnnnnnnnnnnnnnnnnnnnnnnnnnnnnnnnnnnnnnnnnnnnnnnnnnnnnnnnnnnnnnnnnnnnnnnnnnnnnnnnnnnnnnnnnnnnnnnnnnnnnnnnnnnnnnnnnnnnnnnnnnnnnnnnnnnnnnnnnnnnnnnnnnnnnnnnnnnnnnnnnnnnnnnnnnnnnnnnnnnnnnnnnnnnnnnnnnnnnnnnnnnnnnnnnnnnnnnnnnnnnnnnnnnnnnnnnnnnnnnnnnnnnnnnnnnnnnnnnnnnnnnnnnnnnnnnnnnnnnnnnnnnnnnnnnnnnnnnnnnnnnnnnnnnnnnnnnnnnnnnnnnnnnnnnnnnnnnnnnnnnnnnnnnnnnnnnnnnnnnnnnnnnnnnnnnnnnnnnnnnnnnnnnnnnnnnnnnnnnnnnnnnnnnnnnnnnnnnnnnnnnnnnnnnnnnnnnnnnnnnnnnnnnnnnnnnnnnnnnnnnnnnnnnnnnnnnnnnnnnnnnnnnnnnnnnnnnnnnnnnnnnnnnnnnnnnnnnnnnnnnnnnnnnnnnnnnnnnnnnnnnnnnnnnnnnnnnnnnnnnnnnnnnnnnnnnnnnnnnnnnnnnnnnnnnnnnnnnnnnnnnnnnnnnnnnnnnnnnnnnnnnnnnnnnnnnnnnnnnnnnnnnnnnnnnnnnnnnnnnnnnnnnnnnnnnnnnnnnnnnnnnnnnnnnnnnnnnnnnnnnnnnnnnnnnnnnnnnnnnnnnnnnnnnnnnnnnnnnnnnnnnnnnnnnnnnnnnnnnnnnnnnnnnnnnnnnnnnnnnnnnnnnnnnnnnnnnnnnnnnnnnnnnnnnnnnnnnnnnnnnnnnnnnnnnnnnnnnnnnnnnnnnnnnnnnnnnnnnnnnnnnnnnnnnnnnnnnnnnnnnnnnnnnnnnnnnnnnnnnnnnnnnnnnnnnnnnnnnnnnnnnnnnnnnnnnnnnnnnnnnnnnnnnnnnnnnnnnnnnnnnnnnnnnnnnnnnnnnnnnnnnnnnnnnnnnnnnnnnnnnnnnnnnnnnnnnnnnnnnnnnnnnnnnnnnnnnnnnnnnnnnnnnnnnnnnnnnnnnnnnnnnnnnnnnnnnnnnnnnnnnnnnnnnnnnnnnnnnnnnnnnnnnnnnnnnnnnnnnnnnnnnnnnnnnnnnnnnnnnnnnnnnnnnnnnnnnnnnnnnnnnnnnnnnnnnnnnnnnnnnnnnnnnnnnnnnnnnnnnnnnnnnnnnnnnnnnnnnnnnnnnnnnnnnnnnnnnnnnnnnnnnnnnnnnnnnnnnnnnnnnnnnnnnnnnnnnnnnnnnnnnnnnnnnnnnnnnnnnnnnnnnnnnnnnnnnnnnnnnnnnnnnnnnnnnnnnnnnnnnnnnnnnnnnnnnnnnnnnnnnnnnnnnnnnnnnnnnnnnnnnnnnnnnnnnnnnnnnnnnnnnnnnnnnnnnnnnnnnnnnnnnnnnnnnnnnnnnnnnnnnnnnnnnnnnnnnnnnnnnnnnnnnnnnnnnnnnnnnnnnnnnnnnnnnnnnnnnnnnnnnnnnnnnnnnnnnnnnnnnnnnnnnnnnnnnnnnnnnnnnnnnnnnnnnnnnnnnnnnnnnnnnnnnnnnnnnnnnnnnnnnnnnnnnnnnnnnnnnnnnnnnnnnnnnnnnnnnnnnnnnnnnnnnnnnnnnnnnnnnnnnnnnnnnnnnnnnnnnnnnnnnnnnnnnnnnnnnnnnnnnnnnnnnnnnnnnnnnnnnnnnnnnnnnnnnnnnnnnnnnnnnnnnnnnnnnnnnnnnnnnnnnnnnnnnnnnnnnnnnnnnnnnnnnnnnnnnnnnnnnnnnnnnnnnnnnnnnnnnnnnnnnnnnnnnnnnnnnnnnnnnnnnnnnnnnnnnnnnnnnnnnnnnnnnnnnnnnnnnnnnnnnnnnnnnnnnnnnnnnnnnnnnnnnnnnnnnnnnnnnnnnnnnnnnnnnnnnnnnnnnnnnnnnnnnnnnnnnnnnnnnnnnnnnnnnnnnnnnnnnnnnnnnnnnnnnnnnnnnnnnnnnnnnnnnnnnnnnnnnnnnnnnnnnnnnnnnnnnnnnnnnnnnnnnnnnnnnnnnnnnnnnnnnnnnnnnnnnnnnnnnnnnnnnnnnnnnnnnnnnnnnnnnnnnnnnnnnnnnnnnnnnnnnnnnnnnnnnnnnnnnnnnnnnnnnnnnnnnnnnnnnnnnnnnnnnnnnnnnnnnnnnnnnnnnnnnnnnnnnnnnnnnnnnnnnnnnnnnnnnnnnnnnnnnnnnnnnnnnnnnnnnnnnnnnnnnnnnnnnnnnnnnnnnnnnnnnnnnnnnnnnnnnnnnnnnnnnnnnnnnnnnnnnnnnnnnnnnnnnnnnnnnnnnnnnnnnnnnnnnnnnnnnnnnnnnnnnnnnnnnnnnnnnnnnnnnnnnnnnnnnnnnnnnnnnnnnnnnnnnnnnnnnnnnnnnnnnnnnnnnnnnnnnnnnnnnnnnnnnnnnnnnnnnnnnnnnnnnnnnnnnnnnnnnnnnnnnnnnnnnnnnnnnnnnnnnnnnnnnnnnnnnnnnnnnnnnnnnnnnnnnnnnnnnnnnnnnnnnnnnnnnnnnnnnnnnnnnnnnnnnnnnnnnnnnnnnnnnnnnnnnnnnnnnnnnnnnnnnnnnnnnnnnnnnnnnnnnnnnnnnnnnnnnnnnnnnnnnnnnnnnnnnnnnnnnnnnnnnnnnnnnnnnnnnnnnnnnnnnnnnnnnnnnnnnnnnnnnnnnnnnnnnnnnnnnnnnnnnnnnnnnnnnnnnnnnnnnnnnnnnnnnnnnnnnnnnnnnnnnnnnnnnnnnnnnnnnnnnnnnnnnnnnnnnnnnnnnnnnnnnnnnnnnnnnnnnnnnnnnnnnnnnnnnnnnnnnnnnnnnnnnnnnnnnnnnnnnnnnnnnnnnnnnnnnnnnnnnnnnnnnnnnnnnnnnnnnnnnnnnnnnnnnnnnnnnnnnnnnnnnnnnnnnnnnnnnnnnnnnnnnnnnnnnnnnnnnnnnnnnnnnnnnnnnnnnnnnnnnnnnnnnnnnnnnnnnnnnnnnnnnnnnnnnnnnnnnnnnnnnnnnnnnnnnnnnnnnnnnnnnnnnnnnnnnnnnnnnnnnnnnnnnnnnnnnnnnnnnnnnnnnnnnnnnnnnnnnnnnnnnnnnnnnnnnnnnnnnnnnnnnnnnnnnnnnnnnnnnnnnnnnnnnnnnnnnnnnnnnnnnnnnnnnnnnnnnnnnnnnnnnnnnnnnnnnnnnnnnnnnnnnnnnnnnnnnnnnnnnnnnnnnnnnnnnnnnnnnnnnnnnnnnnnnnnnnnnnnnnnnnnnnnnnnnnnnnnnnnnnnnnnnnnnnnnnnnnnnnnnnnnnnnnnnnnnnnnnnnnnnnnnnnnnnnnnnnnnnnnnnnnnnnnnnnnnnnnnnnnnnnnnnnnnnnnnnnnnnnnnnnnnnnnnnnnnnnnnnnnnnnnnnnnnnnnnnnnnnnnnnnnnnnnnnnnnnnnnnnnnnnnnnnnnnnnnnnnnnnnnnnnnnnnnnnnnnnnnnnnnnnnnnnnnnnnnnnnnnnnnnnnnnnnnnnnnnnnnnnnnnnnnnnnnnnnnnnnnnnnnnnnnnnnnnnnnnnnnnnnnnnnnnnnnnnnnnnnnnnnnnnnnnnnnnnnnnnnnnnnnnnnnnnnnnnnnnnnnnnnnnnnnnnnnnnnnnnnnnnnnnnnnnnnnnnnnnnnnnnnnnnnnnnnnnnnnnnnnnnnnnnnnnnnnnnnnnnnnnnnnnnnnnnnnnnnnnnnnnnnnnnnnnnnnnnnnnnnnnnnnnnnnnnnnnnnnnnnnnnnnnnnnnnnnnnnnnnnnnnnnnnnnnnnnnnnnnnnnnnnnnnnnnnnnnnnnnnnnnnnnnnnnnnnnnnnnnnnnnnnnnnnnnnnnnnnnnnnnnnnnnnnnnnnnnnnnnnnnnnnnnnnnnnnnnnnnnnnnnnnnnnnnnnnnnnnnnnnnnnnnnnnnnnnnnnnnnnnnnnnnnnnnnnnnnnnnnnnnnnnnnnnnnnnnnnnnnnnnnnnnnnnnnnnnnnnnnnnnnnnnnnnnnnnnnnnnnnnnnnnnnnnnnnnnnnnnnnnnnnnnnnnnnnnnnnnnnnnnnnnnnnnnnnnnnnnnnnnnnnnnnnnnnnnnnnnnnnnnnnnnnnnnnnnnnnnnnnnnnnnnnnnnnnnnnnnnnnnnnnnnnnnnnnnnnnnnnnnnnnnnnnnnnnnnnnnnnnnnnnnnnnnnnnnnnnnnnnnnnnnnnnnnnnnnnnnnnnnnnnnnnnnnnnnnnnnnnnnnnnnnnnnnnnnnnnnnnnnnnnnnnnnnnnnnnnnnnnnnnnnnnnnnnnnnnnnnnnnnnnnnnnnnnnnnnnnnnnnnnnnnnnnnnnnnnnnnnnnnnnnnnnnnnnnnnnnnnnnnnnnnnnnnnnnnnnnnnnnnnnnnnnnnnnnnnnnnnnnnnnnnnnnnnnnnnnnnnnnnnnnnnnnnnnnnnnnnnnnnnnnnnnnnnnnnnnnnnnnnnnnnnnnnnnnnnnnnnnnnnnnnnnnnnnnnnnnnnnnnnnnnnnnnnnnnnnnnnnnnnnnnnnnnnnnnnnnnnnnnnnnnnnnnnnnnnnnnnnnnnnnnnnnnnnnnnnnnnnnnnnnnnnnnnnnnnnnnnnnnnnnnnnnnnnnnnnnnnnnnnnnnnnnnnnnnnnnnnnnnnnnnnnnnnnnnnnnnnnnnnnnnnnnnnnnnnnnnnnnnnnnnnnnnnnnnnnnnnnnnnnnnnnnnnnnnnnnnnnnnnnnnnnnnnnnnnnnnnnnnnnnnnnnnnnnnnnnnnnnnnnnnnnnnnnnnnnnnnnnnnnnnnnnnnnnnnnnnnnnnnnnnnnnnnnnnnnnnnnnnnnnnnnnnnnnnnnnnnnnnnnnnnnnnnnnnnnnnnnnnnnnnnnnnnnnnnnnnnnnnnnnnnnnnnnnnnnnnnnnnnnnnnnnnnnnnnnnnnnnnnnnnnnnnnnnnnnnnnnnnnnnnnnnnnnnnnnnnnnnnnnnnnnnnnnnnnnnnnnnnnnnnnnnnnnnnnnnnnnnnnnnnnnnnnnnnnnnnnnnnnnnnnnnnnnnnnnnnnnnnnnnnnnnnnnnnnnnnnnnnnnnnnnnnnnnnnnnnnnnnnnnnnnnnnnnnnnnnnnnnnnnnnnnnnnnnnnnnnnnnnnnnnnnnnnnnnnnnnnnnnnnnnnnnnnnnnnnnnnnnnnnnnnnnnnnnnnnnnnnnnnnnnnnnnnnnnnnnnnnnnnnnnnnnnnnnnnnnnnnnnnnnnnnnnnnnnnnnnnnnnnnnnnnnnnnnnnnnnnnnnnnnnnnnnnnnnnnnnnnnnnnnnnnnnnnnnnnnnnnnnnnnnnnnnnnnnnnnnnnnnnnnnnnnnnnnnnnnnnnnnnnnnnnnnnnnnnnnnnnnnnnnnnnnnnnnnnnnnnnnnnnnnnnnnnnnnnnnnnnnnnnnnnnnnnnnnnnnnnnnnnnnnnnnnnnnnnnnnnnnnnnnnnnnnnnnnnnnnnnnnnnnnnnnnnnnnnnnnnnnnnnnnnnnnnnnnnnnnnnnnnnnnnnnnnnnnnnnnnnnnnnnnnnnnnnnnnnnnnnnnnnnnnnnnnnnnnnnnnnnnnnnnnnnnnnnnnnnnnnnnnnnnnnnnnnnnnnnnnnnnnnnnnnnnnnnnnnnnnnnnnnnnnnnnnnnnnnnnnnnnnnnnnnnnnnnnnnnnnnnnnnnnnnnnnnnnnnnnnnnnnnnnnnnnnnnnnnnnnnnnnnnnnnnnnnnnnnnnnnnnnnnnnnnnnnnnnnnnnnnnnnnnnnnnnnnnnnnnnnnnnnnnnnnnnnnnnnnnnnnnnnnnnnnnnnnnnnnnnnnnnnnnnnnnnnnnnnnnnnnnnnnnnnnnnnnnnnnnnnnnnnnnnnnnnnnnnnnnnnnnnnnnnnnnnnnnnnnnnnnnnnnnnnnnnnnnnnnnnnnnnnnnnnnnnnnnnnnnnnnnnnnnnnnnnnnnnnnnnnnnnnnnnnnnnnnnnnnnnnnnnnnnnnnnnnnnnnnnnnnnnnnnnnnnnnnnnnnnnnnnnnnnnnnnnnnnnnnnnnnnnnnnnnnnnnnnnnnnnnnnnnnnnnnnnnnnnnnnnnnnnnnnnnnnnnnnnnnnnnnnnnnnnnnnnnnnnnnnnnnnnnnnnnnnnnnnnnnnnnnnnnnnnnnnnnnnnnnnnnnnnnnnnnnnnnnnnnnnnnnnnnnnnnnnnnnnnnnnnnnnnnnnnnnnnnnnnnnnnnnnnnnnnnnnnnnnnnnnnnnnnnnnnnnnnnnnnnnnnnnnnnnnnnnnnnnnnnnnnnnnnnnnnnnnnnnnnnnnnnnnnnnnnnnnnnnnnnnnnnnnnnnnnnnnnnnnnnnnnnnnnnnnnnnnnnnnnnnnnnnnnnnnnnnnnnnnnnnnnnnnnnnnnnnnnnnnnnnnnnnnnnnnnnnnnnnnnnnnnnnnnnnnnnnnnnnnnnnnnnnnnnnnnnnnnnnnnnnnnnnnnnnnnnnnnnnnnnnnnnnnnnnnnnnnnnnnnnnnnnnnnnnnnnnnnnnnnnnnnnnnnnnnnnnnnnnnnnnnnnnnnnnnnnnnnnnnnnnnnnnnnnnnnnnnnnnnnnnnnnnnnnnnnnnnnnnnnnnnnnnnnnnnnnnnnnnnnnnnnnnnnnnnnnnnnnnnnnnnnnnnnnnnnnnnnnnnnnnnnnnnnnnnnnnnnnnnnnnnnnnnnnnnnnnnnnnnnnnnnnnnnnnnnnnnnnnnnnnnnnnnnnnnnnnnnnnnnnnnnnnnnnnnnnnnnnnnnnnnnnnnnnnnnnnnnnnnnnnnnnnnnnnnnnnnnnnnnnnnnnnnnnnnnnnnnnnnnnnnnnnnnnnnnnnnnnnnnnnnnnnnnnnnnnnnnnnnnnnnnnnnnnnnnnnnnnnnnnnnnnnnnnnnnnnnnnnnnnnnnnnnnnnnnnnnnnnnnnnnnnnnnnnnnnnnnnnnnnnnnnnnnnnnnnnnnnnnnnnnnnnnnnnnnnnnnnnnnnnnnnnnnnnnnnnnnnnnnnnnnnnnnnnnnnnnnnnnnnnnnnnnnnnnnnnnnnnnnnnnnnnnnnnnnnnnnnnnnnnnnnnnnnnnnnnnnnnnnnnnnnnnnnnnnnnnnnnnnnnnnnnnnnnnnnnnnnnnnnnnnnnnnnnnnnnnnnnnnnnnnnnnnnnnnnnnnnnnnnnnnnnnnnnnnnnnnnnnnnnnnnnnnnnnnnnnnnnnnnnnnnnnnnnnnnnnnnnnnnnnnnnnnnnnnnnnnnnnnnnnnnnnnnnnnnnnnnnnnnnnnnnnnnnnnnnnnnnnnnnnnnnnnnnnnnnnnnnnnnnnnnnnnnnnnnnnnnnnnnnnnnnnnnnnnnnnnnnnnnnnnnnnnnnnnnnnnnnnnnnnnnnnnnnnnnnnnnnnnnnnnnnnnnnnnnnnnnnnnnnnnnnnnnnnnnnnnnnnnnnnnnnnnnnnnnnnnnnnnnnnnnnnnnnnnnnnnnnnnnnnnnnnnnnnnnnnnnnnnnnnnnnnnnnnnnnnnnnnnnnnnnnnnnnnnnnnnnnnnnnnnnnnnnnnnnnnnnnnnnnnnnnnnnnnnnnnnnnnnnnnnnnnnnnnnnnnnnnnnnnnnnnnnnnnnnnnnnnnnnnnnnnnnnnnnnnnnnnnnnnnnnnnnnnnnnnnnnnnnnnnnnnnnnnnnnnnnnnnnnnnnnnnnnnnnnnnnnnnnnnnnnnnnnnnnnnnnnnnnnnnnnnnnnnnnnnnnnnnnnnnnnnnnnnnnnnnnnnnnnnnnnnnnnnnnnnnnnnnnnnnnnnnnnnnnnnnnnnnnnnnnnnnnnnnnnnnnnnnnnnnnnnnnnnnnnnnnnnnnnnnnnnnnnnnnnnnnnnnnnnnnnnnnnnnnnnnnnnnnnnnnnnnnnnnnnnnnnnnnnnnnnnnnnnnnnnnnnnnnnnnnnnnnnnnnnnnnnnnnnnnnnnnnnnnnnnnnnnnnnnnnnnnnnnnnnnnnnnnnnnnnnnnnnnnnnnnnnnnnnnnnnnnnnnnnnnnnnnnnnnnnnnnnnnnnnnnnnnnnnnnnnnnnnnnnnnnnnnnnnnnnnnnnnnnnnnnnnnnnnnnnnnnnnnnnnnnnnnnnnnnnnnnnnnnnnnnnnnnnnnnnnnnnnnnnnnnnnnnnnnnnnnnnnnnnnnnnnnnnnnnnnnnnnnnnnnnnnnnnnnnnnnnnnnnnnnnnnnnnnnnnnnnnnnnnnnnnnnnnnnnnnnnnnnnnnnnnnnnnnnnnnnnnnnnnnnnnnnnnnnnnnnnnnnnnnnnnnnnnnnnnnnnnnnnnnnnnnnnnnnnnnnnnnnnnnnnnnnnnnnnnnnnnnnnnnnnnnnnnnnnnnnnnnnnnnnnnnnnnnnnnnnnnnnnnnnnnnnnnnnnnnnnnnnnnnnnnnnnnnnnnnnnnnnnnnnnnnnnnnnnnnnnnnnnnnnnnnnnnnnnnnnnnnnnnnnnnnnnnnnnnnnnnnnnnnnnnnnnnnnnnnnnnnnnnnnnnnnnnnnnnnnnnnnnnnnnnnnnnnnnnnnnnnnnnnnnnnnnnnnnnnnnnnnnnnnnnnnnnnnnnnnnnnnnnnnnnnnnnnnnnnnnnnnnnnnnnnnnnnnnnnnnnnnnnnnnnnnnnnnnnnnnnnnnnnnnnnnnnnnnnnnnnnnnnnnnnnnnnnnnnnnnnnnnnnnnnnnnnnnnnnnnnnnnnnnnnnnnnnnnnnnnnnnnnnnnnnnnnnnnnnnnnnnnnnnnnnnnnnnnnnnnnnnnnnnnnnnnnnnnnnnnnnnnnnnnnnnnnnnnnnnnnnnnnnnnnnnnnnnnnnnnnnnnnnnnnnnnnnnnnnnnnnnnnnnnnnnnnnnnnnnnnnnnnnnnnnnnnnnnnnnnnnnnnnnnnnnnnnnnnnnnnnnnnnnnnnnnnnnnnnnnnnnnnnnnnnnnnnnnnnnnnnnnnnnnnnnnnnnnnnnnnnnnnnnnnnnnnnnnnnnnnnnnnnnnnnnnnnnnnnnnnnnnnnnnnnnnnnnnnnnnnnnnnnnnnnnnnnnnnnnnnnnnnnnnnnnnnnnnnnnnnnnnnnnnnnnnnnnnnnnnnnnnnnnnnnnnnnnnnnnnnnnnnnnnnnnnnnnnnnnnnnnnnnnnnnnnnnnnnnnnnnnnnnnnnnnnnnnnnnnnnnnnnnnnnnnnnnnnnnnnnnnnnnnnnnnnnnnnnnnnnnnnnnnnnnnnnnnnnnnnnnnnnnnnnnnnnnnnnnnnnnnnnnnnnnnnnnnnnnnnnnnnnnnnnnnnnnnnnnnnnnnnnnnnnnnnnnnnnnnnnnnnnnnnnnnnnnnnnnnnnnnnnnnnnnnnnnnnnnnnnnnnnnnnnnnnnnnnnnnnnnnnnnnnnnnnnnnnnnnnnnnnnnnnnnnnnnnnnnnnnnnnnnnnnnnnnnnnnnnnnnnnnnnnnnnnnnnnnnnnnnnnnnnnnnnnnnnnnnnnnnnnnnnnnnnnnnnnnnnnnnnnnnnnnnnnnnnnnnnnnnnnnnnnnnnnnnnnnnnnnnnnnnnnnnnnnnnnnnnnnnnnnnnnnnnnnnnnnnnnnnnnnnnnnnnnnnnnnnnnnnnnnnnnnnnnnnnnnnnnnnnnnnnnnnnnnnnnnnnnnnnnnnnnnnnnnnnnnnnnnnnnnnnnnnnnnnnnnnnnnnnnnnnnnnnnnnnnnnnnnnnnnnnnnnnnnnnnnnnnnnnnnnnnnnnnnnnnnnnnnnnnnnnnnnnnnnnnnnnnnnnnnnnnnnnnnnnnnnnnnnnnnnnnnnnnnnnnnnnnnnnnnnnnnnnnnnnnnnnnnnnnnnnnnnnnnnnnnnnnnnnnnnnnnnnnnnnnnnnnnnnnnnnnnnnnnnnnnnnnnnnnnnnnnnnnnnnnnnnnnnnnnnnnnnnnnnnnnnnnnnnnnnnnnnnnnnnnnnnnnnnnnnnnnnnnnnnnnnnnnnnnnnnnnnnnnnnnnnnnnnnnnnnnnnnnnnnnnnnnnnnnnnnnnnnnnnnnnnnnnnnnnnnnnnnnnnnnnnnnnnnnnnnnnnnnnnnnnnnnnnnnnnnnnnnnnnnnnnnnnnnnnnnnnnnnnnnnnnnnnnnnnnnnnnnnnnnnnnnnnnnnnnnnnnnnnnnnnnnnnnnnnnnnnnnnnnnnnnnnnnnnnnnnnnnnnnnnnnnnnnnnnnnnnnnnnnnnnnnnnnnnnnnnnnnnnnnnnnnnnnnnnnnnnnnnnnnnnnnnnnnnnnnnnnnnnnnnnnnnnnnnnnnnnnnnnnnnnnnnnnnnnnnnnnnnnnnnnnnnnnnnnnnnnnnnnnnnnnnnnnnnnnnnnnnnnnnnnnnnnnnnnnnnnnnnnnnnnnnnnnnnnnnnnnnnnnnnnnnnnnnnnnnnnnnnnnnnnnnnnnnnnnnnnnnnnnnnnnnnnnnnnnnnnnnnnnnnnnnnnnnnnnnnnnnnnnnnnnnnnnnnnnnnnnnnnnnnnnnnnnnnnnnnnnnnnnnnnnnnnnnnnnnnnnnnnnnnnnnnnnnnnnnnnnnnnnnnnnnnnnnnnnnnnnnnnnnnnnnnnnnnnnnnnnnnnnnnnnnnnnnnnnnnnnnnnnnnnnnnnnnnnnnnnnnnnnnnnnnnnnnnnnnnnnnnnnnnnnnnnnnnnnnnnnnnnnnnnnnnnnnnnnnnnnnnnnnnnnnnnnnnnnnnnnnnnnnnnnnnnnnnnnnnnnnnnnnnnnnnnnnnnnnnnnnnnnnnnnnnnnnnnnnnnnnnnnnnnnnnnnnnnnnnnnnnnnnnnnnnnnnnnnnnnnnnnnnnnnnnnnnnnnnnnnnnnnnnnnnnnnnnnnnnnnnnnnnnnnnnnnnnnnnnnnnnnnnnnnnnnnnnnnnnnnnnnnnnnnnnnnnnnnnnnnnnnnnnnnnnnnnnnnnnnnnnnnnnnnnnnnnnnnnnnnnnnnnnnnnnnnnnnnnnnnnnnnnnnnnnnnnnnnnnnnnnnnnnnnnnnnnnnnnnnnnnnnnnnnnnnnnnnnnnnnnnnnnnnnnnnnnnnnnnnnnnnnnnnnnnnnnnnnnnnnnnnnnnnnnnnnnnnnnnnnnnnnnnnnnnnnnnnnnnnnnnnnnnnnnnnnnnnnnnnnnnnnnnnnnnnnnnnnnnnnnnnnnnnnnnnnnnnnnnnnnnnnnnnnnnnnnnnnnnnnnnnnnnnnnnnnnnnnnnnnnnnnnnnnnnnnnnnnnnnnnnnnnnnnnnnnnnnnnnnnnnnnnnnnnnnnnnnnnnnnnnnnnnnnnnnnnnnnnnnnnnnnnnnnnnnnnnnnnnnnnnnnnnnnnnnnnnnnnnnnnnnnnnnnnnnnnnnnnnnnnnnnnnnnnnnnnnnnnnnnnnnnnnnnnnnnnnnnnnnnnnnnnnnnnnnnnnnnnnnnnnnnnnnnnnnnnnnnnnnnnnnnnnnnnnnnnnnnnnnnnnnnnnnnnnnnnnnnnnnnnnnnnnnnnnnnnnnnnnnnnnnnnnnnnnnnnnnnnnnnnnnnnnnnnnnnnnnnnnnnnnnnnnnnnnnnnnnnnnnnnnnnnnnnnnnnnnnnnnnnnnnnnnnnnnnnnnnnnnnnnnnnnnnnnnnnnnnnnnnnnnnnnnnnnnnnnnnnnnnnnnnnnnnnnnnnnnnnnnnnnnnnnnnnnnnnnnnnnnnnnnnnnnnnnnnnnnnnnnnnnnnnnnnnnnnnnnnnnnnnnnnnnnnnnnnnnnnnnnnnnnnnnnnnnnnnnnnnnnnnnnnnnnnnnnnnnnnnnnnnnnnnnnnnnnnnnnnnnnnnnnnnnnnnnnnnnnnnnnnnnnnnnnnnnnnnnnnnnnnnnnnnnnnnnnnnnnnnnnnnnnnnnnnnnnnnnnnnnnnnnnnnnnnnnnnnnnnnnnnnnnnnnnnnnnnnnnnnnnnnnnnnnnnnnnnnnnnnnnnnnnnnnnnnnnnnnnnnnnnnnnnnnnnnnnnnnnnnnnnnnnnnnnnnnnnnnnnnnnnnnnnnnnnnnnnnnnnnnnnnnnnnnnnnnnnnnnnnnnnnnnnnnnnnnnnnnnnnnnnnnnnnnnnnnnnnnnnnnnnnnnnnnnnnnnnnnnnnnnnnnnnnnnnnnnnnnnnnnnnnnnnnnnnnnnnnnnnnnnnnnnnnnnnnnnnnnnnnnnnnnnnnnnnnnnnnnnnnnnnnnnnnnnnnnnnnnnnnnnnnnnnnnnnnnnnnnnnnnnnnnnnnnnnnnnnnnnnnnnnnnnnnnnnnnnnnnnnnnnnnnnnnnnnnnnnnnnnnnnnnnnnnnnnnnnnnnnnnnnnnnnnnnnnnnnnnnnnnnnnnnnnnnnnnnnnnnnnnnnnnnnnnnnnnnnnnnnnnnnnnnnnnnnnnnnnnnnnnnnnnnnnnnnnnnnnnnnnnnnnnnnnnnnnnnnnnnnnnnnnnnnnnnnnnnnnnnnnnnnnnnnnnnnnnnnnnnnnnnnnnnnnnnnnnnnnnnnnnnnnnnnnnnnnnnnnnnnnnnnnnnnnnnnnnnnnnnnnnnnnnnnnnnnnnnnnnnnnnnnnnnnnnnnnnnnnnnnnnnnnnnnnnnnnnnnnnnnnnnnnnnnnnnnnnnnnnnnnnnnnnnnnnnnnnnnnnnnnnnnnnnnnnnnnnnnnnnnnnnnnnnnnnnnnnnnnnnnnnnnnnnnnnnnnnnnnnnnnnnnnnnnnnnnnnnnnnnnnnnnnnnnnnnnnnnnnnnnnnnnnnnnnnnnnnnnnnnnnnnnnnnnnnnnnnnnnnnnnnnnnnnnnnnnnnnnnnnnnnnnnnnnnnnnnnnnnnnnnnnnnnnnnnnnnnnnnnnnnnnnnnnnnnnnnnnnnnnnnnnnnnnnnnnnnnnnnnnnnnnnnnnnnnnnnnnnnnnnnnnnnnnnnnnnnnnnnnnnnnnnnnnnnnnnnnnnnnnnnnnnnnnnnnnnnnnnnnnnnnnnnnnnnnnnnnnnnnnnnnnnnnnnnnnnnnnnnnnnnnnnnnnnnnnnnnnnnnnnnnnnnnnnnnnnnnnnnnnnnnnnnnnnnnnnnnnnnnnnnnnnnnnnnnnnnnnnnnnnnnnnnnnnnnnnnnnnnnnnnnnnnnnnnnnnnnnnnnnnnnnnnnnnnnnnnnnnnnnnnnnnnnnnnnnnnnnnnnnnnnnnnnnnnnnnnnnnnnnnnnnnnnnnnnnnnnnnnnnnnnnnnnnnnnnnnnnnnnnnnnnnnnnnnnnnnnnnnnnnnnnnnnnnnnnnnnnnnnnnnnnnnnnnnnnnnnnnnnnnnnnnnnnnnnnnnnnnnnnnnnnnnnnnnnnnnnnnnnnnnnnnnnnnnnnnnnnnnnnnnnnnnnnnnnnnnnnnnnnnnnnnnnnnnnnnnnnnnnnnnnnnnnnnnnnnnnnnnnnnnnnnnnnnnnnnnnnnnnnnnnnnnnnnnnnnnnnnnnnnnnnnnnnnnnnnnnnnnnnnnnnnnnnnnnnnnnnnnnnnnnnnnnnnnnnnnnnnnnnnnnnnnnnnnnnnnnnnnnnnnnnnnnnnnnnnnnnnnnnnnnnnnnnnnnnnnnnnnnnnnnnnnnnnnnnnnnnnnnnnnnnnnnnnnnnnnnnnnnnnnnnnnnnnnnnnnnnnnnnnnnnnnnnnnnnnnnnnnnnnnnnnnnnnnnnnnnnnnnnnnnnnnnnnnnnnnnnnnnnnnnnnnnnnnnnnnnnnnnnnnnnnnnnnnnnnnnnnnnnnnnnnnnnnnnnnnnnnnnnnnnnnnnnnnnnnnnnnnnnnnnnnnnnnnnnnnnnnnnnnnnnnnnnnnnnnnnnnnnnnnnnnnnnnnnnnnnnnnnnnnnnnnnnnnnnnnnnnnnnnnnnnnnnnnnnnnnnnnnnnnnnnnnnnnnnnnnnnnnnnnnnnnnnnnnnnnnnnnnnnnnnnnnnnnnnnnnnnnnnnnnnnnnnnnnnnnnnnnnnnnnnnnnnnnnnnnnnnnnnnnnnnnnnnnnnnnnnnnnnnnnnnnnnnnnnnnnnnnnnnnnnnnnnnnnnnnnnnnnnnnnnnnnnnnnnnnnnnnnnnnnnnnnnnnnnnnnnnnnnnnnnnnnnnnnnnnnnnnnnnnnnnnnnnnnnnnnnnnnnnnnnnnnnnnnnnnnnnnnnnnnnnnnnnnnnnnnnnnnnnnnnnnnnnnnnnnnnnnnnnnnnnnnnnnnnnnnnnnnnnnnnnnnnnnnnnnnnnnnnnnnnnnnnnnnnnnnnnnnnnnnnnnnnnnnnnnnnnnnnnnnnnnnnnnnnnnnnnnnnnnnnnnnnnnnnnnnnnnnnnnnnnnnnnnnnnnnnnnnnnnnnnnnnnnnnnnnnnnnnnnnnnnnnnnnnnnnnnnnnnnnnnnnnnnnnnnnnnnnnnnnnnnnnnnnnnnnnnnnnnnnnnnnnnnnnnnnnnnnnnnnnnnnnnnnnnnnnnnnnnnnnnnnnnnnnnnnnnnnnnnnnnnnnnnnnnnnnnnnnnnnnnnnnnnnnnnnnnnnnnnnnnnnnnnnnnnnnnnnnnnnnnnnnnnnnnnnnnnnnnnnnnnnnnnnnnnnnnnnnnnnnnnnnnnnnnnnnnnnnnnnnnnnnnnnnnnnnnnnnnnnnnnnnnnnnnnnnnnnnnnnnnnnnnnnnnnnnnnnnnnnnnnnnnnnnnnnnnnnnnnnnnnnnnnnnnnnnnnnnnnnnnnnnnnnnnnnnnnnnnnnnnnnnnnnnnnnnnnnnnnnnnnnnnnnnnnnnnnnnnnnnnnnnnnnnnnnnnnnnnnnnnnnnnnnnnnnnnnnnnnnnnnnnnnnnnnnnnnnnnnnnnnnnnnnnnnnnnnnnnnnnnnnnnnnnnnnnnnnnnnnnnnnnnnnnnnnnnnnnnnnnnnnnnnnnnnnnnnnnnnnnnnnnnnnnnnnnnnnnnnnnnnnnnnnnnnnnnnnnnnnnnnnnnnnnnnnnnnnnnnnnnnnnnnnnnnnnnnnnnnnnnnnnnnnnnnnnnnnnnnnnnnnnnnnnnnnnnnnnnnnnnnnnnnnnnnnnnnnnnnnnnnnnnnnnnnnnnnnnnnnnnnnnnnnnnnnnnnnnnnnnnnnnnnnnnnnnnnnnnnnnnnnnnnnnnnnnnnnnnnnnnnnnnnnnnnnnnnnnnnnnnnnnnnnnnnnnnnnnnnnnnnnnnnnnnnnnnnnnnnnnnnnnnnnnnnnnnnnnnnnnnnnnnnnnnnnnnnnnnnnnnnnnnnnnnnnnnnnnnnnnnnnnnnnnnnnnnnnnnnnnnnnnnnnnnnnnnnnnnnnnnnnnnnnnnnnnnnnnnnnnnnnnnnnnnnnnnnnnnnnnnnnnnnnnnnnnnnnnnnnnnnnnnnnnnnnnnnnnnnnnnnnnnnnnnnnnnnnnnnnnnnnnnnnnnnnnnnnnnnnnnnnnnnnnnnnnnnnnnnnnnnnnnnnnnnnnnnnnnnnnnnnnnnnnnnnnnnnnnnnnnnnnnnnnnnnnnnnnnnnnnnnnnnnnnnnnnnnnnnnnnnnnnnnnnnnnnnnnnnnnnnnnnnnnnnnnnnnnnnnnnnnnnnnnnnnnnnnnnnnnnnnnnnnnnnnnnnnnnnnnnnnnnnnnnnnnnnnnnnnnnnnnnnnnnnnnnnnnnnnnnnnnnnnnnnnnnnnnnnnnnnnnnnnnnnnnnnnnnnnnnnnnnnnnnnnnnnnnnnnnnnnnnnnnnnnnnnnnnnnnnnnnnnnnnnnnnnnnnnnnnnnnnnnnnnnnnnnnnnnnnnnnnnnnnnnnnnnnnnnnnnnnnnnnnnnnnnnnnnnnnnnnnnnnnnnnnnnnnnnnnnnnnnnnnnnnnnnnnnnnnnnnnnnnnnnnnnnnnnnnnnnnnnnnnnnnnnnnnnnnnnnnnnnnnnnnnnnnnnnnnnnnnnnnnnnnnnnnnnnnnnnnnnnnnnnnnnnnnnnnnnnnnnnnnnnnnnnnnnnnnnnnnnnnnnnnnnnnnnnnnnnnnnnnnnnnnnnnnnnnnnnnnnnnnnnnnnnnnnnnnnnnnnnnnnnnnnnnnnnnnnnnnnnnnnnnnnnnnnnnnnnnnnnnnnnnnnnnnnnnnnnnnnnnnnnnnnnnnnnnnnnnnnnnnnnnnnnnnnnnnnnnnnnnnnnnnnnnnnnnnnnnnnnnnnnnnnnnnnnnnnnnnnnnnnnnnnnnnnnnnnnnnnnnnnnnnnnnnnnnnnnnnnnnnnnnnnnnnnnnnnnnnnnnnnnnnnnnnnnnnnnnnnnnnnnnnnnnnnnnnnnnnnnnnnnnnnnnnnnnnnnnnnnnnnnnnnnnnnnnnnnnnnnnnnnnnnnnnnnnnnnnnnnnnnnnnnnnnnnnnnnnnnnnnnnnnnnnnnnnnnnnnnnnnnnnnnnnnnnnnnnnnnnnnnnnnnnnnnnnnnnnnnnnnnnnnnnnnnnnnnnnnnnnnnnnnnnnnnnnnnnnnnnnnnnnnnnnnnnnnnnnnnnnnnnnnnnnnnnnnnnnnnnnnnnnnnnnnnnnnnnnnnnnnnnnnnnnnnnnnnnnnnnnnnnnnnnnnnnnnnnnnnnnnnnnnnnnnnnnnnnnnnnnnnnnnnnnnnnnnnnnnnnnnnnnnnnnnnnnnnnnnnnnnnnnnnnnnnnnnnnnnnnnnnnnnnnnnnnnnnnnnnnnnnnnnnnnnnnnnnnnnnnnnnnnnnnnnnnnnnnnnnnnnnnnnnnnnnnnnnnnnnnnnnnnnnnnnnnnnnnnnnnnnnnnnnnnnnnnnnnnnnnnnnnnnnnnnnnnnnnnnnnnnnnnnnnnnnnnnnnnnnnnnnnnnnnnnnnnnnnnnnnnnnnnnnnnnnnnnnnnnnnnnnnnnnnnnnnnnnnnnnnnnnnnnnnnnnnnnnnnnnnnnnnnnnnnnnnnnnnnnnnnnnnnnnnnnnnnnnnnnnnnnnnnnnnnnnnnnnnnnnnnnnnnnnnnnnnnnnnnnnnnnnnnnnnnnnnnnnnnnnnnnnnnnnnnnnnnnnnnnnnnnnnnnnnnnnnnnnnnnnnnnnnnnnnnnnnnnnnnnnnnnnnnnnnnnnnnnnnnnnnnnnnnnnnnnnnnnnnnnnnnnnnnnnnnnnnnnnnnnnnnnnnnnnnnnnnnnnnnnnnnnnnnnnnnnnnnnnnnnnnnnnnnnnnnnnnnnnnnnnnnnnnnnnnnnnnnnnnnnnnnnnnnnnnnnnnnnnnnnnnnnnnnnnnnnnnnnnnnnnnnnnnnnnnnnnnnnnnnnnnnnnnnnnnnnnnnnnnnnnnnnnnnnnnnnnnnnnnnnnnnnnnnnnnnnnnnnnnnnnnnnnnnnnnnnnnnnnnnnnnnnnnnnnnnnnnnnnnnnnnnnnnnnnnnnnnnnnnnnnnnnnnnnnnnnnnnnnnnnnnnnnnnnnnnnnnnnnnnnnnnnnnnnnnnnnnnnnnnnnnnnnnnnnnnnnnnnnnnnnnnnnnnnnnnnnnnnnnnnnnnnnnnnnnnnnnnnnnnnnnnnnnnnnnnnnnnnnnnnnnnnnnnnnnnnnnnnnnnnnnnnnnnnnnnnnnnnnnnnnnnnnnnnnnnnnnnnnnnnnnnnnnnnnnnnnnnnnnnnnnnnnnnnnnnnnnnnnnnnnnnnnnnnnnnnnnnnnnnnnnnnnnnnnnnnnnnnnnnnnnnnnnnnnnnnnnnnnnnnnnnnnnnnnnnnnnnnnnnnnnnnnnnnnnnnnnnnnnnnnnnnnnnnnnnnnnnnnnnnnnnnnnnnnnnnnnnnnnnnnnnnnnnnnnnnnnnnnnnnnnnnnnnnnnnnnnnnnnnnnnnnnnnnnnnnnnnnnnnnnnnnnnnnnnnnnnnnnnnnnnnnnnnnnnnnnnnnnnnnnnnnnnnnnnnnnnnnnnnnnnnnnnnnnnnnnnnnnnnnnnnnnnnnnnnnnnnnnnnnnnnnnnnnnnnnnnnnnnnnnnnnnnnnnnnnnnnnnnnnnnnnnnnnnnnnnnnnnnnnnnnnnnnnnnnnnnnnnnnnnnnnnnnnnnnnnnnnnnnnnnnnnnnnnnnnnnnnnnnnnnnnnnnnnnnnnnnnnnnnnnnnnnnnnnnnnnnnnnnnnnnnnnnnnnnnnnnnnnnnnnnnnnnnnnnnnnnnnnnnnnnnnnnnnnnnnnnnnnnnnnnnnnnnnnnnnnnnnnnnnnnnnnnnnnnnnnnnnnnnnnnnnnnnnnnnnnnnnnnnnnnnnnnnnnnnnnnnnnnnnnnnnnnnnnnnnnnnnnnnnnnnnnnnnnnnnnnnnnnnnnnnnnnnnnnnnnnnnnnnnnnnnnnnnnnnnnnnnnnnnnnnnnnnnnnnnnnnnnnnnnnnnnnnnnnnnnnnnnnnnnnnnnnnnnnnnnnnnnnnnnnnnnnnnnnnnnnnnnnnnnnnnnnnnnnnnnnnnnnnnnnnnnnnnnnnnnnnnnnnnnnnnnnnnnnnnnnnnnnnnnnnnnnnnnnnnnnnnnnnnnnnnnnnnnnnnnnnnnnnnnnnnnnnnnnnnnnnnnnnnnnnnnnnnnnnnnnnnnnnnnnnnnnnnnnnnnnnnnnnnnnnnnnnnnnnnnnnnnnnnnnnnnnnnnnnnnnnnnnnnnnnnnnnnnnnnnnnnnnnnnnnnnnnnnnnnnnnnnnnnnnnnnnnnnnnnnnnnnnnnnnnnnnnnnnnnnnnnnnnnnnnnnnnnnnnnnnnnnnnnnnnnnnnnnnnnnnnnnnnnnnnnnnnnnnnnnnnnnnnnnnnnnnnnnnnnnnnnnnnnnnnnnnnnnnnnnnnnnnnnnnnnnnnnnnnnnnnnnnnnnnnnnnnnnnnnnnnnnnnnnnnnnnnnnnnnnnnnnnnnnnnnnnnnnnnnnnnnnnnnnnnnnnnnnnnnnnnnnnnnnnnnnnnnnnnnnnnnnnnnnnnnnnnnnnnnnnnnnnnnnnnnnnnnnnnnnnnnnnnnnnnnnnnnnnnnnnnnnnnnnnnnnnnnnnnnnnnnnnnnnnnnnnnnnnnnnnnnnnnnnnnnnnnnnnnnnnnnnnnnnnnnnnnnnnnnnnnnnnnnnnnnnnnnnnnnnnnnnnnnnnnnnnnnnnnnnnnnnnnnnnnnnnnnnnnnnnnnnnnnnnnnnnnnnnnnnnnnnnnnnnnnnnnnnnnnnnnnnnnnnnnnnnnnnnnnnnnnnnnnnnnnnnnnnnnnnnnnnnnnnnnnnnnnnnnnnnnnnnnnnnnnnnnnnnnnnnnnnnnnnnnnnnnnnnnnnnnnnnnnnnnnnnnnnnnnnnnnnnnnnnnnnnnnnnnnnnnnnnnnnnnnnnnnnnnnnnnnnnnnnnnnnnnnnnnnnnnnnnnnnnnnnnnnnnnnnnnnnnnnnnnnnnnnnnnnnnnnnnnnnnnnnnnnnnnnnnnnnnnnnnnnnnnnnnnnnnnnnnnnnnnnnnnnnnnnnnnnnnnnnnnnnnnnnnnnnnnnnnnnnnnnnnnnnnnnnnnnnnnnnnnnnnnnnnnnnnnnnnnnnnnnnnnnnnnnnnnnnnnnnnnnnnnnnnnnnnnnnnnnnnnnnnnnnnnnnnnnnnnnnnnnnnnnnnnnnnnnnnnnnnnnnnnnnnnnnnnnnnnnnnnnnnnnnnnnnnnnnnnnnnnnnnnnnnnnnnnnnnnnnnnnnnnnnnnnnnnnnnnnnnnnnnnnnnnnnnnnnnnnnnnnnnnnnnnnnnnnnnnnnnnnnnnnnnnnnnnnnnnnnnnnnnnnnnnnnnnnnnnnnnnnnnnnnnnnnnnnnnnnnnnnnnnnnnnnnnnnnnnnnnnnnnnnnnnnnnnnnnnnnnnnnnnnnnnnnnnnnnnnnnnnnnnnnnnnnnnnnnnnnnnnnnnnnnnnnnnnnnnnnnnnnnnnnnnnnnnnnnnnnnnnnnnnnnnnnnnnnnnnnnnnnnnnnnnnnnnnnnnnnnnnnnnnnnnnnnnnnnnnnnnnnnnnnnnnnnnnnnnnnnnnnnnnnnnnnnnnnnnnnnnnnnnnnnnnnnnnnnnnnnnnnnnnnnnnnnnnnnnnnnnnnnnnnnnnnnnnnnnnnnnnnnnnnnnnnnnnnnnnnnnnnnnnnnnnnnnnnnnnnnnnnnnnnnnnnnnnnnnnnnnnnnnnnnnnnnnnnnnnnnnnnnnnnnnnnnnnnnnnnnnnnnnnnnnnnnnnnnnnnnnnnnnnnnnnnnnnnnnnnnnnnnnnnnnnnnnnnnnnnnnnnnnnnnnnnnnnnnnnnnnnnnnnnnnnnnnnnnnnnnnnnnnnnnnnnnnnnnnnnnnnnnnnnnnnnnnnnnnnnnnnnnnnnnnnnnnnnnnnnnnnnnnnnnnnnnnnnnnnnnnnnnnnnnnnnnnnnnnnnnnnnnnnnnnnnnnnnnnnnnnnnnnnnnnnnnnnnnnnnnnnnnnnnnnnnnnnnnnnnnnnnnnnnnnnnnnnnnnnnnnnnnnnnnnnnnnnnnnnnnnnnnnnnnnnnnnnnnnnnnnnnnnnnnnnnnnnnnnnnnnnnnnnnnnnnnnnnnnnnnnnnnnnnnnnnnnnnnnnnnnnnnnnnnnnnnnnnnnnnnnnnnnnnnnnnnnnnnnnnnnnnnnnnnnnnnnnnnnnnnnnnnnnnnnnnnnnnnnnnnnnnnnnnnnnnnnnnnnnnnnnnnnnnnnnnnnnnnnnnnnnnnnnnnnnnnnnnnnnnnnnnnnnnnnnnnnnnnnnnnnnnnnnnnnnnnnnnnnnnnnnnnnnnnnnnnnnnnnnnnnnnnnnnnnnnnnnnnnnnnnnnnnnnnnnnnnnnnnnnnnnnnnnnnnnnnnnnnnnnnnnnnnnnnnnnnnnnnnnnnnnnnnnnnnnnnnnnnnnnnnnnnnnnnnnnnnnnnnnnnnnnnnnnnnnnnnnnnnnnnnnnnnnnnnnnnnnnnnnnnnnnnnnnnnnnnnnnnnnnnnnnnnnnnnnnnnnnnnnnnnnnnnnnnnnnnnnnnnnnnnnnnnnnnnnnnnnnnnnnnnnnnnnnnnnnnnnnnnnnnnnnnnnnnnnnnnnnnnnnnnnnnnnnnnnnnnnnnnnnnnnnnnnnnnnnnnnnnnnnnnnnnnnnnnnnnnnnnnnnnnnnnnnnnnnnnnnnnnnnnnnnnnnnnnnnnnnnnnnnnnnnnnnnnnnnnnnnnnnnnnnnnnnnnnnnnnnnnnnnnnnnnnnnnnnnnnnnnnnnnnnnnnnnnnnnnnnnnnnnnnnnnnnnnnnnnnnnnnnnnnnnnnnnnnnnnnnnnnnnnnnnnnnnnnnnnnnnnnnnnnnnnnnnnnnnnnnnnnnnnnnnnnnnnnnnnnnnnnnnnnnnnnnnnnnnnnnnnnnnnnnnnnnnnnnnnnnnnnnnnnnnnnnnnnnnnnnnnnnnnnnnnnnnnnnnnnnnnnnnnnnnnnnnnnnnnnnnnnnnnnnnnnnnnnnnnnnnnnnnnnnnnnnnnnnnnnnnnnnnnnnnnnnnnnnnnnnnnnnnnnnnnnnnnnnnnnnnnnnnnnnnnnnnnnnnnnnnnnnnnnnnnnnnnnnnnnnnnnnnnnnnnnnnnnnnnnnnnnnnnnnnnnnnnnnnnnnnnnnnnnnnnnnnnnnnnnnnnnnnnnnnnnnnnnnnnnnnnnnnnnnnnnnnnnnnnnnnnnnnnnnnnnnnnnnnnnnnnnnnnnnnnnnnnnnnnnnnnnnnnnnnnnnnnnnnnnnnnnnnnnnnnnnnnnnnnnnnnnnnnnnnnnnnnnnnnnnnnnnnnnnnnnnnnnnnnnnnnnnnnnnnnnnnnnnnnnnnnnnnnnnnnnnnnnnnnnnnnnnnnnnnnnnnnnnnnnnnnnnnnnnnnnnnnnnnnnnnnnnnnnnnnnnnnnnnnnnnnnnnnnnnnnnnnnnnnnnnnnnnnnnnnnnnnnnnnnnnnnnnnnnnnnnnnnnnnnnnnnnnnnnnnnnnnnnnnnnnnnnnnnnnnnnnnnnnnnnnnnnnnnnnnnnnnnnnnnnnnnnnnnnnnnnnnnnnnnnnnnnnnnnnnnnnnnnnnnnnnnnnnnnnnnnnnnnnnnnnnnnnnnnnnnnnnnnnnnnnnnnnnnnnnnnnnnnnnnnnnnnnnnnnnnnnnnnnnnnnnnnnnnnnnnnnnnnnnnnnnnnnnnnnnnnnnnnnnnnnnnnnnnnnnnnnnnnnnnnnnnnnnnnnnnnnnnnnnnnnnnnnnnnnnnnnnnnnnnnnnnnnnnnnnnnnnnnnnnnnnnnnnnnnnnnnnnnnnnnnnnnnnnnnnnnnnnnnnnnnnnnnnnnnnnnnnnnnnnnnnnnnnnnnnnnnnnnnnnnnnnnnnnnnnnnnnnnnnnnnnnnnnnnnnnnnnnnnnnnnnnnnnnnnnnnnnnnnnnnnnnnnnnnnnnnnnnnnnnnnnnnnnnnnnnnnnnnnnnnnnnnnnnnnnnnnnnnnnnnnnnnnnnnnnnnnnnnnnnnnnnnnnnnnnnnnnnnnnnnnnnnnnnnnnnnnnnnnnnnnnnnnnnnnnnnnnnnnnnnnnnnnnnnnnnnnnnnnnnnnnnnnnnnnnnnnnnnnnnnnnnnnnnnnnnnnnnnnnnnnnnnnnnnnnnnnnnnnnnnnnnnnnnnnnnnnnnnnnnnnnnnnnnnnnnnnnnnnnnnnnnnnnnnnnnnnnnnnnnnnnnnnnnnnnnnnnnnnnnnnnnnnnnnnnnnnnnnnnnnnnnnnnnnnnnnnnnnnnnnnnnnnnnnnnnnnnnnnnnnnnnnnnnnnnnnnnnnnnnnnnnnnnnnnnnnnnnnnnnnnnnnnnnnnnnnnnnnnnnnnnnnnnnnnnnnnnnnnnnnnnnnnnnnnnnnnnnnnnnnnnnnnnnnnnnnnnnnnnnnnnnnnnnnnnnnnnnnnnnnnnnnnnnnnnnnnnnnnnnnnnnnnnnnnnnnnnnnnnnnnnnnnnnnnnnnnnnnnnnnnnnnnnnnnnnnnnnnnnnnnnnnnnnnnnnnnnnnnnnnnnnnnnnnnnnnnnnnnnnnnnnnnnnnnnnnnnnnnnnnnnnnnnnnnnnnnnnnnnnnnnnnnnnnnnnnnnnnnnnnnnnnnnnnnnnnnnnnnnnnnnnnnnnnnnnnnnnnnnnnnnnnnnnnnnnnnnnnnnnnnnnnnnnnnnnnnnnnnnnnnnnnnnnnnnnnnnnnnnnnnnnnnnnnnnnnnnnnnnnnnnnnnnnnnnnnnnnnnnnnnnnnnnnnnnnnnnnnnnnnnnnnnnnnnnnnnnnnnnnnnnnnnnnnnnnnnnnnnnnnnnnnnnnnnnnnnnnnnnnnnnnnnnnnnnnnnnnnnnnnnnnnnnnnnnnnnnnnnnnnnnnnnnnnnnnnnnnnnnnnnnnnnnnnnnnnnnnnnnnnnnnnnnnnnnnnnnnnnnnnnnnnnnnnnnnnnnnnnnnnnnnnnnnnnnnnnnnnnnnnnnnnnnnnnnnnnnnnnnnnnnnnnnnnnnnnnnnnnnnnnnnnnnnnnnnnnnnnnnnnnnnnnnnnnnnnnnnnnnnnnnnnnnnnnnnnnnnnnnnnnnnnnnnnnnnnnnnnnnnnnnnnnnnnnnnnnnnnnnnnnnnnnnnnnnnnnnnnnnnnnnnnnnnnnnnnnnnnnnnnnnnnnnnnnnnnnnnnnnnnnnnnnnnnnnnnnnnnnnnnnnnnnnnnnnnnnnnnnnnnnnnnnnnnnnnnnnnnnnnnnnnnnnnnnnnnnnnnnnnnnnnnnnnnnnnnnnnnnnnnnnnnnnnnnnnnnnnnnnnnnnnnnnnnnnnnnnnnnnnnnnnnnnnnnnnnnnnnnnnnnnnnnnnnnnnnnnnnnnnnnnnnnnnnnnnnnnnnnnnnnnnnnnnnnnnnnnnnnnnnnnnnnnnnnnnnnnnnnnnnnnnnnnnnnnnnnnnnnnnnnnnnnnnnnnnnnnnnnnnnnnnnnnnnnnnnnnnnnnnnnnnnnnnnnnnnnnnnnnnnnnnnnnnnnnnnnnnnnnnnnnnnnnnnnnnnnnnnnnnnnnnnnnnnnnnnnnnnnnnnnnnnnnnnnnnnnnnnnnnnnnnnnnnnnnnnnnnnnnnnnnnnnnnnnnnnnnnnnnnnnnnnnnnnnnnnnnnnnnnnnnnnnnnnnnnnnnnnnnnnnnnnnnnnnnnnnnnnnnnnnnnnnnnnnnnnnnnnnnnnnnnnnnnnnnnnnnnnnnnnnnnnnnnnnnnnnnnnnnnnnnnnnnnnnnnnnnnnnnnnnnnnnnnnnnnnnnnnnnnnnnnnnnnnnnnnnnnnnnnnnnnnnnnnnnnnnnnnnnnnnnnnnnnnnnnnnnnnnnnnnnnnnnnnnnnnnnnnnnnnnnnnnnnnnnnnnnnnnnnnnnnnnnnnnnnnnnnnnnnnnnnnnnnnnnnnnnnnnnnnnnnnnnnnnnnnnnnnnnnnnnnnnnnnnnnnnnnnnnnnnnnnnnnnnnnnnnnnnnnnnnnnnnnnnnnnnnnnnnnnnnnnnnnnnnnnnnnnnnnnnnnnnnnnnnnnnnnnnnnnnnnnnnnnnnnnnnnnnnnnnnnnnnnnnnnnnnnnnnnnnnnnnnnnnnnnnnnnnnnnnnnnnnnnnnnnnnnnnnnnnnnnnnnnnnnnnnnnnnnnnnnnnnnnnnnnnnnnnnnnnnnnnnnnnnnnnnnnnnnnnnnnnnnnnnnnnnnnnnnnnnnnnnnnnnnnnnnnnnnnnnnnnnnnnnnnnnnnnnnnnnnnnnnnnnnnnnnnnnnnnnnnnnnnnnnnnnnnnnnnnnnnnnnnnnnnnnnnnnnnnnnnnnnnnnnnnnnnnnnnnnnnnnnnnnnnnnnnnnnnnnnnnnnnnnnnnnnnnnnnnnnnnnnnnnnnnnnnnnnnnnnnnnnnnnnnnnnnnnnnnnnnnnnnnnnnnnnnnnnnnnnnnnnnnnnnnnnnnnnnnnnnnnnnnnnnnnnnnnnnnnnnnnnnnnnnnnnnnnnnnnnnnnnnnnnnnnnnnnnnnnnnnnnnnnnnnnnnnnnnnnnnnnnnnnnnnnnnnnnnnnnnnnnnnnnnnnnnnnnnnnnnnnnnnnnnnnnnnnnnnnnnnnnnnnnnnnnnnnnnnnnnnnnnnnnnnnnnnnnnnnnnnnnnnnnnnnnnnnnnnnnnnnnnnnnnnnnnnnnnnnnnnnnnnnnnnnnnnnnnnnnnnnnnnnnnnnnnnnnnnnnnnnnnnnnnnnnnnnnnnnnnnnnnnnnnnnnnnnnnnnnnnnnnnnnnnnnnnnnnnnnnnnnnnnnnnnnnnnnnnnnnnnnnnnnnnnnnnnnnnnnnnnnnnnnnnnnnnnnnnnnnnnnnnnnnnnnnnnnnnnnnnnnnnnnnnnnnnnnnnnnnnnnnnnnnnnnnnnnnnnnnnnnnnnnnnnnnnnnnnnnnnnnnnnnnnnnnnnnnnnnnnnnnnnnnnnnnnnnnnnnnnnnnnnnnnnnnnnnnnnnnnnnnnnnnnnnnnnnnnnnnnnnnnnnnnnnnnnnnnnnnnnnnnnnnnnnnnnnnnnnnnnnnnnnnnnnnnnnnnnnnnnnnnnnnnnnnnnnnnnnnnnnnnnnnnnnnnnnnnnnnnnnnnnnnnnnnnnnnnnnnnnnnnnnnnnnnnnnnnnnnnnnnnnnnnnnnnnnnnnnnnnnnnnnnnnnnnnnnnnnnnnnnnnnnnnnnnnnnnnnnnnnnnnnnnnnnnnnnnnnnnnnnnnnnnnnnnnnnnnnnnnnnnnnnnnnnnnnnnnnnnnnnnnnnnnnnnnnnnnnnnnnnnnnnnnnnnnnnnnnnnnnnnnnnnnnnnnnnnnnnnnnnnnnnnnnnnnnnnnnnnnnnnnnnnnnnnnnnnnnnnnnnnnnnnnnnnnnnnnnnnnnnnnnnnnnnnnnnnnnnnnnnnnnnnnnnnnnnnnnnnnnnnnnnnnnnnnnnnnnnnnnnnnnnnnnnnnnnnnnnnnnnnnnnnnnnnnnnnnnnnnnnnnnnnnnnnnnnnnnnnnnnnnnnnnnnnnnnnnnnnnnnnnnnnnnnnnnnnnnnnnnnnnnnnnnnnnnnnnnnnnnnnnnnnnnnnnnnnnnnnnnnnnnnnnnnnnnnnnnnnnnnnnnnnnnnnnnnnnnnnnnnnnnnnnnnnnnnnnnnnnnnnnnnnnnnnnnnnnnnnnnnnnnnnnnnnnnnnnnnnnnnnnnnnnnnnnnnnnnnnnnnnnnnnnnnnnnnnnnnnnnnnnnnnnnnnnnnnnnnnnnnnnnnnnnnnnnnnnnnnnnnnnnnnnnnnnnnnnnnnnnnnnnnnnnnnnnnnnnnnnnnnnnnnnnnnnnnnnnnnnnnnnnnnnnnnnnnnnnnnnnnnnnnnnnnnnnnnnnnnnnnnnnnnnnnnnnnnnnnnnnnnnnnnnnnnnnnnnnnnnnnnnnnnnnnnnnnnnnnnnnnnnnnnnnnnnnnnnnnnnnnnnnnnnnnnnnnnnnnnnnnnnnnnnnnnnnnnnnnnnnnnnnnnnnnnnnnnnnnnnnnnnnnnnnnnnnnnnnnnnnnnnnnnnnnnnnnnnnnnnnnnnnnnnnnnnnnnnnnnnnnnnnnnnnnnnnnnnnnnnnnnnnnnnnnnnnnnnnnnnnnnnnnnnnnnnnnnnnnnnnnnnnnnnnnnnnnnnnnnnnnnnnnnnnnnnnnnnnnnnnnnnnnnnnnnnnnnnnnnnnnnnnnnnnnnnnnnnnnnnnnnnnnnnnnnnnnnnnnnnnnnnnnnnnnnnnnnnnnnnnnnnnnnnnnnnnnnnnnnnnnnnnnnnnnnnnnnnnnnnnnnnnnnnnnnnnnnnnnnnnnnnnnnnnnnnnnnnnnnnnnnnnnnnnnnnnnnnnnnnnnnnnnnnnnnnnnnnnnnnnnnnnnnnnnnnnnnnnnnnnnnnnnnnnnnnnnnnnnnnnnnnnnnnnnnnnnnnnnnnnnnnnnnnnnnnnnnnnnnnnnnnnnnnnnnnnnnnnnnnnnnnnnnnnnnnnnnnnnnnnnnnnnnnnnnnnnnnnnnnnnnnnnnnnnnnnnnnnnnnnnnnnnnnnnnnnnnnnnnnnnnnnnnnnnnnnnnnnnnnnnnnnnnnnnnnnnnnnnnnnnnnnnnnnnnnnnnnnnnnnnnnnnnnnnnnnnnnnnnnnnnnnnnnnnnnnnnnnnnnnnnnnnnnnnnnnnnnnnnnnnnnnnnnnnnnnnnnnnnnnnnnnnnnnnnnnnnnnnnnnnnnnnnnnnnnnnnnnnnnnnnnnnnnnnnnnnnnnnnnnnnnnnnnnnnnnnnnnnnnnnnnnnnnnnnnnnnnnnnnnnnnnnnnnnnnnnnnnnnnnnnnnnnnnnnnnnnnnnnnnnnnnnnnnnnnnnnnnnnnnnnnnnnnnnnnnnnnnnnnnnnnnnnnnnnnnnnnnnnnnnnnnnnnnnnnnnnnnnnnnnnnnnnnnnnnnnnnnnnnnnnnnnnnnnnnnnnnnnnnnnnnnnnnnnnnnnnnnnnnnnnnnnnnnnnnnnnnnnnnnnnnnnnnnnnnnnnnnnnnnnnnnnnnnnnnnnnnnnnnnnnnnnnnnnnnnnnnnnnnnnnnnnnnnnnnnnnnnnnnnnnnnnnnnnnnnnnnnnnnnnnnnnnnnnnnnnnnnnnnnnnnnnnnnnnnnnnnnnnnnnnnnnnnnnnnnnnnnnnnnnnnnnnnnnnnnnnnnnnnnnnnnnnnnnnnnnnnnnnnnnnnnnnnnnnnnnnnnnnnnnnnnnnnnnnnnnnnnnnnnnnnnnnnnnnnnnnnnnnnnnnnnnnnnnnnnnnnnnnnnnnnnnnnnnnnnnnnnnnnnnnnnnnnnnnnnnnnnnnnnnnnnnnnnnnnnnnnnnnnnnnnnnnnnnnnnnnnnnnnnnnnnnnnnnnnnnnnnnnnnnnnnnnnnnnnnnnnnnnnnnnnnnnnnnnnnnnnnnnnnnnnnnnnnnnnnnnnnnnnnnnnnnnnnnnnnnnnnnnnnnnnnnnnnnnnnnnnnnnnnnnnnnnnnnnnnnnnnnnnnnnnnnnnnnnnnnnnnnnnnnnnnnnnnnnnnnnnnnnnnnnnnnnnnnnnnnnnnnnnnnnnnnnnnnnnnnnnnnnnnnnnnnnnnnnnnnnnnnnnnnnnnnnnnnnnnnnnnnnnnnnnnnnnnnnnnnnnnnnnnnnnnnnnnnnnnnnnnnnnnnnnnnnnnnnnnnnnnnnnnnnnnnnnnnnnnnnnnnnnnnnnnnnnnnnnnnnnnnnnnnnnnnnnnnnnnnnnnnnnnnnnnnnnnnnnnnnnnnnnnnnnnnnnnnnnnnnnnnnnnnnnnnnnnnnnnnnnnnnnnnnnnnnnnnnnnnnnnnnnnnnnnnnnnnnnnnnnnnnnnnnnnnnnnnnnnnnnnnnnnnnnnnnnnnnnnnnnnnnnnnnnnnnnnnnnnnnnnnnnnnnnnnnnnnnnnnnnnnnnnnnnnnnnnnnnnnnnnnnnnnnnnnnnnnnnnnnnnnnnnnnnnnnnnnnnnnnnnnnnnnnnnnnnnnnnnnnnnnnnnnnnnnnnnnnnnnnnnnnnnnnnnnnnnnnnnnnnnnnnnnnnnnnnnnnnnnnnnnnnnnnnnnnnnnnnnnnnnnnnnnnnnnnnnnnnnnnnnnnnnnnnnnnnnnnnnnnnnnnnnnnnnnnnnnnnnnnnnnnnnnnnnnnnnnnnnnnnnnnnnnnnnnnnnnnnnnnnnnnnnnnnnnnnnnnnnnnnnnnnnnnnnnnnnnnnnnnnnnnnnnnnnnnnnnnnnnnnnnnnnnnnnnnnnnnnnnnnnnnnnnnnnnnnnnnnnnnnnnnnnnnnnnnnnnnnnnnnnnnnnnnnnnnnnnnnnnnnnnnnnnnnnnnnnnnnnnnnnnnnnnnnnnnnnnnnnnnnnnnnnnnnnnnnnnnnnnnnnnnnnnnnnnnnnnnnnnnnnnnnnnnnnnnnnnnnnnnnnnnnnnnnnnnnnnnnnnnnnnnnnnnnnnnnnnnnnnnnnnnnnnnnnnnnnnnnnnnnnnnnnnnnnnnnnnnnnnnnnnnnnnnnnnnnnnnnnnnnnnnnnnnnnnnnnnnnnnnnnnnnnnnnnnnnnnnnnnnnnnnnnnnnnnnnnnnnnnnnnnnnnnnnnnnnnnnnnnnnnnnnnnnnnnnnnnnnnnnnnnnnnnnnnnnnnnnnnnnnnnnnnnnnnnnnnnnnnnnnnnnnnnnnnnnnnnnnnnnnnnnnnnnnnnnnnnnnnnnnnnnnnnnnnnnnnnnnnnnnnnnnnnnnnnnnnnnnnnnnnnnnnnnnnnnnnnnnnnnnnnnnnnnnnnnnnnnnnnnnnnnnnnnnnnnnnnnnnnnnnnnnnnnnnnnnnnnnnnnnnnnnnnnnnnnnnnnnnnnnnnnnnnnnnnnnnnnnnnnnnnnnnnnnnnnnnnnnnnnnnnnnnnnnnnnnnnnnnnnnnnnnnnnnnnnnnnnnnnnnnnnnnnnnnnnnnnnnnnnnnnnnnnnnnnnnnnnnnnnnnnnnnnnnnnnnnnnnnnnnnnnnnnnnnnnnnnnnnnnnnnnnnnnnnnnnnnnnnnnnnnnnnnnnnnnnnnnnnnnnnnnnnnnnnnnnnnnnnnnnnnnnnnnnnnnnnnnnnnnnnnnnnnnnnnnnnnnnnnnnnnnnnnnnnnnnnnnnnnnnnnnnnnnnnnnnnnnnnnnnnnnnnnnnnnnnnnnnnnnnnnnnnnnnnnnnnnnnnnnnnnnnnnnnnnnnnnnnnnnnnnnnnnnnnnnnnnnnnnnnnnnnnnnnnnnnnnnnnnnnnnnnnnnnnnnnnnnnnnnnnnnnnnnnnnnnnnnnnnnnnnnnnnnnnnnnnnnnnnnnnnnnnnnnnnnnnnnnnnnnnnnnnnnnnnnnnnnnnnnnnnnnnnnnnnnnnnnnnnnnnnnnnnnnnnnnnnnnnnnnnnnnnnnnnnnnnnnnnnnnnnnnnnnnnnnnnnnnnnnnnnnnnnnnnnnnnnnnnnnnnnnnnnnnnnnnnnnnnnnnnnnnnnnnnnnnnnnnnnnnnnnnnnnnnnnnnnnnnnnnnnnnnnnnnnnnnnnnnnnnnnnnnnnnnnnnnnnnnnnnnnnnnnnnnnnnnnnnnnnnnnnnnnnnnnnnnnnnnnnnnnnnnnnnnnnnnnnnnnnnnnnnnnnnnnnnnnnnnnnnnnnnnnnnnnnnnnnnnnnnnnnnnnnnnnnnnnnnnnnnnnnnnnnnnnnnnnnnnnnnnnnnnnnnnnnnnnnnnnnnnnnnnnnnnnnnnnnnnnnnnnnnnnnnnnnnnnnnnnnnnnnnnnnnnnnnnnnnnnnnnnnnnnnnnnnnnnnnnnnnnnnnnnnnnnnnnnnnnnnnnnnnnnnnnnnnnnnnnnnnnnnnnnnnnnnnnnnnnnnnnnnnnnnnnnnnnnnnnnnnnnnnnnnnnnnnnnnnnnnnnnnnnnnnnnnnnnnnnnnnnnnnnnnnnnnnnnnnnnnnnnnnnnnnnnnnnnnnnnnnnnnnnnnnnnnnnnnnnnnnnnnnnnnnnnnnnnnnnnnnnnnnnnnnnnnnnnnnnnnnnnnnnnnnnnnnnnnnnnnnnnnnnnnnnnnnnnnnnnnnnnnnnnnnnnnnnnnnnnnnnnnnnnnnnnnnnnnnnnnnnnnnnnnnnnnnnnnnnnnnnnnnnnnnnnnnnnnnnnnnnnnnnnnnnnnnnnnnnnnnnnnnnnnnnnnnnnnnnnnnnnnnnnnnnnnnnnnnnnnnnnnnnnnnnnnnnnnnnnnnnnnnnnnnnnnnnnnnnnnnnnnnnnnnnnnnnnnnnnnnnnnnnnnnnnnnnnnnnnnnnnnnnnnnnnnnnnnnnnnnnnnnnnnnnnnnnnnnnnnnnnnnnnnnnnnnnnnnnnnnnnnnnnnnnnnnnnnnnnnnnnnnnnnnnnnnnnnnnnnnnnnnnnnnnnnnnnnnnnnnnnnnnnnnnnnnnnnnnnnnnnnnnnnnnnnnnnnnnnnnnnnnnnnnnnnnnnnnnnnnnnnnnnnnnnnnnnnnnnnnnnnnnnnnnnnnnnnnnnnnnnnnnnnnnnnnnnnnnnnnnnnnnnnnnnnnnnnnnnnnnnnnnnnnnnnnnnnnnnnnnnnnnnnnnnnnnnnnnnnnnnnnnnnnnnnnnnnnnnnnnnnnnnnnnnnnnnnnnnnnnnnnnnnnnnnnnnnnnnnnnnnnnnnnnnnnnnnnnnnnnnnnnnnnnnnnnnnnnnnnnnnnnnnnnnnnnnnnnnnnnnnnnnnnnnnnnnnnnnnnnnnnnnnnnnnnnnnnnnnnnnnnnnnnnnnnnnnnnnnnnnnnnnnnnnnnnnnnnnnnnnnnnnnnnnnnnnnnnnnnnnnnnnnnnnnnnnnnnnnnnnnnnnnnnnnnnnnnnnnnnnnnnnnnnnnnnnnnnnnnnnnnnnnnnnnnnnnnnnnnnnnnnnnnnnnnnnnnnnnnnnnnnnnnnnnnnnnnnnnnnnnnnnnnnnnnnnnnnnnnnnnnnnnnnnnnnnnnnnnnnnnnnnnnnnnnnnnnnnnnnnnnnnnnnnnnnnnnnnnnnnnnnnnnnnnnnnnnnnnnnnnnnnnnnnnnnnnnnnnnnnnnnnnnnnnnnnnnnnnnnnnnnnnnnnnnnnnnnnnnnnnnnnnnnnnnnnnnnnnnnnnnnnnnnnnnnnnnnnnnnnnnnnnnnnnnnnnnnnnnnnnnnnnnnnnnnnnnnnnnnnnnnnnnnnnnnnnnnnnnnnnnnnnnnnnnnnnnnnnnnnnnnnnnnnnnnnnnnnnnnnnnnnnnnnnnnnnnnnnnnnnnnnnnnnnnnnnnnnnnnnnnnnnnnnnnnnnnnnnnnnnnnnnnnnnnnnnnnnnnnnnnnnnnnnnnnnnnnnnnnnnnnnnnnnnnnnnnnnnnnnnnnnnnnnnnnnnnnnnnnnnnnnnnnnnnnnnnnnnnnnnnnnnnnnnnnnnnnnnnnnnnnnnnnnnnnnnnnnnnnnnnnnnnnnnnnnnnnnnnnnnnnnnnnnnnnnnnnnnnnnnnnnnnnnnnnnnnnnnnnnnnnnnnnnnnnnnnnnnnnnnnnnnnnnnnnnnnnnnnnnnnnnnnnnnnnnnnnnnnnnnnnnnnnnnnnnnnnnnnnnnnnnnnnnnnnnnnnnnnnnnnnnnnnnnnnnnnnnnnnnnnnnnnnnnnnnnnnnnnnnnnnnnnnnnnnnnnnnnnnnnnnnnnnnnnnnnnnnnnnnnnnnnnnnnnnnnnnnnnnnnnnnnnnnnnnnnnnnnnnnnnnnnnnnnnnnnnnnnnnnnnnnnnnnnnnnnnnnnnnnnnnnnnnnnnnnnnnnnnnnnnnnnnnnnnnnnnnnnnnnnnnnnnnnnnnnnnnnnnnnnnnnnnnnnnnnnnnnnnnnnnnnnnnnnnnnnnnnnnnnnnnnnnnnnnnnnnnnnnnnnnnnnnnnnnnnnnnnnnnnnnnnnnnnnnnnnnnnnnnnnnnnnnnnnnnnnnnnnnnnnnnnnnnnnnnnnnnnnnnnnnnnnnnnnnnnnnnnnnnnnnnnnnnnnnnnnnnnnnnnnnnnnnnnnnnnnnnnnnnnnnnnnnnnnnnnnnnnnnnnnnnnnnnnnnnnnnnnnnnnnnnnnnnnnnnnnnnnnnnnnnnnnnnnnnnnnnnnnnnnnnnnnnnnnnnnnnnnnnnnnnnnnnnnnnnnnnnnnnnnnnnnnnnnnnnnnnnnnnnnnnnnnnnnnnnnnnnnnnnnnnnnnnnnnnnnnnnnnnnnnnnnnnnnnnnnnnnnnnnnnnnnnnnnnnnnnnnnnnnnnnnnnnnnnnnnnnnnnnnnnnnnnnnnnnnnnnnnnnnnnnnnnnnnnnnnnnnnnnnnnnnnnnnnnnnnnnnnnnnnnnnnnnnnnnnnnnnnnnnnnnnnnnnnnnnnnnnnnnnnnnnnnnnnnnnnnnnnnnnnnnnnnnnnnnnnnnnnnnnnnnnnnnnnnnnnnnnnnnnnnnnnnnnnnnnnnnnnnnnnnnnnnnnnnnnnnnnnnnnnnnnnnnnnnnnnnnnnnnnnnnnnnnnnnnnnnnnnnnnnnnnnnnnnnnnnnnnnnnnnnnnnnnnnnnnnnnnnnnnnnnnnnnnnnnnnnnnnnnnnnnnnnnnnnnnnnnnnnnnnnnnnnnnnnnnnnnnnnnnnnnnnnnnnnnnnnnnnnnnnnnnnnnnnnnnnnnnnnnnnnnnnnnnnnnnnnnnnnnnnnnnnnnnnnnnnnnnnnnnnnnnnnnnnnnnnnnnnnnnnnnnnnnnnnnnnnnnnnnnnnnnnnnnnnnnnnnnnnnnnnnnnnnnnnnnnnnnnnnnnnnnnnnnnnnnnnnnnnnnnnnnnnnnnnnnnnnnnnnnnnnnnnnnnnnnnnnnnnnnnnnnnnnnnnnnnnnnnnnnnnnnnnnnnnnnnnnnnnnnnnnnnnnnnnnnnnnnnnnnnnnnnnnnnnnnnnnnnnnnnnnnnnnnnnnnnnnnnnnnnnnnnnnnnnnnnnnnnnnnnnnnnnnnnnnnnnnnnnnnnnnnnnnnnnnnnnnnnnnnnnnnnnnnnnnnnnnnnnnnnnnnnnnnnnnnnnnnnnnnnnnnnnnnnnnnnnnnnnnnnnnnnnnnnnnnnnnnnnnnnnnnnnnnnnnnnnnnnnnnnnnnnnnnnnnnnnnnnnnnnnnnnnnnnnnnnnnnnnnnnnnnnnnnnnnnnnnnnnnnnnnnnnnnnnnnnnnnnnnnnnnnnnnnnnnnnnnnnnnnnnnnnnnnnnnnnnnnnnnnnnnnnnnnnnnnnnnnnnnnnnnnnnnnnnnnnnnnnnnnnnnnnnnnnnnnnnnnnnnnnnnnnnnnnnnnnnnnnnnnnnnnnnnnnnnnnnnnnnnnnnnnnnnnnnnnnnnnnnnnnnnnnnnnnnnnnnnnnnnnnnnnnnnnnnnnnnnnnnnnnnnnnnnnnnnnnnnnnnnnnnnnnnnnnnnnnnnnnnnnnnnnnnnnnnnnnnnnnnnnnnnnnnnnnnnnnnnnnnnnnnnnnnnnnnnnnnnnnnnnnnnnnnnnnnnnnnnnnnnnnnnnnnnnnnnnnnnnnnnnnnnnnnnnnnnnnnnnnnnnnnnnnnnnnnnnnnnnnnnnnnnnnnnnnnnnnnnnnnnnnnnnnnnnnnnnnnnnnnnnnnnnnnnnnnnnnnnnnnnnnnnnnnnnnnnnnnnnnnnnnnnnnnnnnnnnnnnnnnnnnnnnnnnnnnnnnnnnnnnnnnnnnnnnnnnnnnnnnnnnnnnnnnnnnnnnnnnnnnnnnnnnnnnnnnnnnnnnnnnnnnnnnnnnnnnnnnnnnnnnnnnnnnnnnnnnnnnnnnnnnnnnnnnnnnnnnnnnnnnnnnnnnnnnnnnnnnnnnnnnnnnnnnnnnnnnnnnnnnnnnnnnnnnnnnnnnnnnnnnnnnnnnnnnnnnnnnnnnnnnnnnnnnnnnnnnnnnnnnnnnnnnnnnnnnnnnnnnnnnnnnnnnnnnnnnnnnnnnnnnnnnnnnnnnnnnnnnnnnnnnnnnnnnnnnnnnnnnnnnnnnnnnnnnnnnnnnnnnnnnnnnnnnnnnnnnnnnnnnnnnnnnnnnnnnnnnnnnnnnnnnnnnnnnnnnnnnnnnnnnnnnnnnnnnnnnnnnnnnnnnnnnnnnnnnnnnnnnnnnnnnnnnnnnnnnnnnnnnnnnnnnnnnnnnnnnnnnnnnnnnnnnnnnnnnnnnnnnnnnnnnnnnnnnnnnnnnnnnnnnnnnnnnnnnnnnnnnnnnnnnnnnnnnnnnnnnnnnnnnnnnnnnnnnnnnnnnnnnnnnnnnnnnnnnnnnnnnnnnnnnnnnnnnnnnnnnnnnnnnnnnnnnnnnnnnnnnnnnnnnnnnnnnnnnnnnnnnnnnnnnnnnnnnnnnnnnnnnnnnnnnnnnnnnnnnnnnnnnnnnnnnnnnnnnnnnnnnnnnnnnnnnnnnnnnnnnnnnnnnnnnnnnnnnnnnnnnnnnnnnnnnnnnnnnnnnnnnnnnnnnnnnnnnnnnnnnnnnnnnnnnnnnnnnnnnnnnnnnnnnnnnnnnnnnnnnnnnnnnnnnnnnnnnnnnnnnnnnnnnnnnnnnnnnnnnnnnnnnnnnnnnnnnnnnnnnnnnnnnnnnnnnnnnnnnnnnnnnnnnnnnnnnnnnnnnnnnnnnnnnnnnnnnnnnnnnnnnnnnnnnnnnnnnnnnnnnnnnnnnnnnnnnnnnnnnnnnnnnnnnnnnnnnnnnnnnnnnnnnnnnnnnnnnnnnnnnnnnnnnnnnnnnnnnnnnnnnnnnnnnnnnnnnnnnnnnnnnnnnnnnnnnnnnnnnnnnnnnnnnnnnnnnnnnnnnnnnnnnnnnnnnnnnnnnnnnnnnnnnnnnnnnnnnnnnnnnnnnnnnnnnnnnnnnnnnnnnnnnnnnnnnnnnnnnnnnnnnnnnnnnnnnnnnnnnnnnnnnnnnnnnnnnnnnnnnnnnnnnnnnnnnnnnnnnnnnnnnnnnnnnnnnnnnnnnnnnnnnnnnnnnnnnnnnnnnnnnnnnnnnnnnnnnnnnnnnnnnnnnnnnnnnnnnnnnnnnnnnnnnnnnnnnnnnnnnnnnnnnnnnnnnnnnnnnnnnnnnnnnnnnnnnnnnnnnnnnnnnnnnnnnnnnnnnnnnnnnnnnnnnnnnnnnnnnnnnnnnnnnnnnnnnnnnnnnnnnnnnnnnnnnnnnnnnnnnnnnnnnnnnnnnnnnnnnnnnnnnnnnnnnnnnnnnnnnnnnnnnnnnnnnnnnnnnnnnnnnnnnnnnnnnnnnnnnnnnnnnnnnnnnnnnnnnnnnnnnnnnnnnnnnnnnnnnnnnnnnnnnnnnnnnnnnnnnnnnnnnnnnnnnnnnnnnnnnnnnnnnnnnnnnnnnnnnnnnnnnnnnnnnnnnnnnnnnnnnnnnnnnnnnnnnnnnnnnnnnnnnnnnnnnnnnnnnnnnnnnnnnnnnnnnnnnnnnnnnnnnnnnnnnnnnnnnnnnnnnnnnnnnnnnnnnnnnnnnnnnnnnnnnnnnnnnnnnnnnnnnnnnnnnnnnnnnnnnnnnnnnnnnnnnnnnnnnnnnnnnnnnnnnnnnnnnnnnnnnnnnnnnnnnnnnnnnnnnnnnnnnnnnnnnnnnnnnnnnnnnnnnnnnnnnnnnnnnnnnnnnnnnnnnnnnnnnnnnnnnnnnnnnnnnnnnnnnnnnnnnnnnnnnnnnnnnnnnnnnnnnnnnnnnnnnnnnnnnnnnnnnnnnnnnnnnnnnnnnnnnnnnnnnnnnnnnnnnnnnnnnnnnnnnnnnnnnnnnnnnnnnnnnnnnnnnnnnnnnnnnnnnnnnnnnnnnnnnnnnnnnnnnnnnnnnnnnnnnnnnnnnnnnnnnnnnnnnnnnnnnnnnnnnnnnnnnnnnnnnnnnnnnnnnnnnnnnnnnnnnnnnnnnnnnnnnnnnnnnnnnnnnnnnnnnnnnnnnnnnnnnnnnnnnnnnnnnnnnnnnnnnnnnnnnnnnnnnnnnnnnnnnnnnnnnnnnnnnnnnnnnnnnnnnnnnnnnnnnnnnnnnnnnnnnnnnnnnnnnnnnnnnnnnnnnnnnnnnnnnnnnnnnnnnnnnnnnnnnnnnnnnnnnnnnnnnnnnnnnnnnnnnnnnnnnnnnnnnnnnnnnnnnnnnnnnnnnnnnnnnnnnnnnnnnnnnnnnnnnnnnnnnnnnnnnnnnnnnnnnnnnnnnnnnnnnnnnnnnnnnnnnnnnnnnnnnnnnnnnnnnnnnnnnnnnnnnnnnnnnnnnnnnnnnnnnnnnnnnnnnnnnnnnnnnnnnnnnnnnnnnnnnnnnnnnnnnnnnnnnnnnnnnnnnnnnnnnnnnnnnnnnnnnnnnnnnnnnnnnnnnnnnnnnnnnnnnnnnnnnnnnnnnnnnnnnnnnnnnnnnnnnnnnnnnnnnnnnnnnnnnnnnnnnnnnnnnnnnnnnnnnnnnnnnnnnnnnnnnnnnnnnnnnnnnnnnnnnnnnnnnnnnnnnnnnnnnnnnnnnnnnnnnnnnnnnnnnnnnnnnnnnnnnnnnnnnnnnnnnnnnnnnnnnnnnnnnnnnnnnnnnnnnnnnnnnnnnnnnnnnnnnnnnnnnnnnnnnnnnnnnnnnnnnnnnnnnnnnnnnnnnnnnnnnnnnnnnnnnnnnnnnnnnnnnnnnnnnnnnnnnnnnnnnnnnnnnnnnnnnnnnnnnnnnnnnnnnnnnnnnnnnnnnnnnnnnnnnnnnnnnnnnnnnnnnnnnnnnnnnnnnnnnnnnnnnnnnnnnnnnnnnnnnnnnnnnnnnnnnnnnnnnnnnnnnnnnnnnnnnnnnnnnnnnnnnnnnnnnnnnnnnnnnnnnnnnnnnnnnnnnnnnnnnnnnnnnnnnnnnnnnnnnnnnnnnnnnnnnnnnnnnnnnnnnnnnnnnnnnnnnnnnnnnnnnnnnnnnnnnnnnnnnnnnnnnnnnnnnnnnnnnnnnnnnnnnnnnnnnnnnnnnnnnnnnnnnnnnnnnnnnnnnnnnnnnnnnnnnnnnnnnnnnnnnnnnnnnnnnnnnnnnnnnnnnnnnnnnnnnnnnnnnnnnnnnnnnnnnnnnnnnnnnnnnnnnnnnnnnnnnnnnnnnnnnnnnnnnnnnnnnnnnnnnnnnnnnnnnnnnnnnnnnnnnnnnnnnnnnnnnnnnnnnnnnnnnnnnnnnnnnnnnnnnnnnnnnnnnnnnnnnnnnnnnnnnnnnnnnnnnnnnnnnnnnnnnnnnnnnnnnnnnnnnnnnnnnnnnnnnnnnnnnnnnnnnnnnnnnnnnnnnnnnnnnnnnnnnnnnnnnnnnnnnnnnnnnnnnnnnnnnnnnnnnnnnnnnnnnnnnnnnnnnnnnnnnnnnnnnnnnnnnnnnnnnnnnnnnnnnnnnnnnnnnnnnnnnnnnnnnnnnnnnnnnnnnnnnnnnnnnnnnnnnnnnnnnnnnnnnnnnnnnnnnnnnnnnnnnnnnnnnnnnnnnnnnnnnnnnnnnnnnnnnnnnnnnnnnnnnnnnnnnnnnnnnnnnnnnnnnnnnnnnnnnnnnnnnnnnnnnnnnnnnnnnnnnnnnnnnnnnnnnnnnnnnnnnnnnnnnnnnnnnnnnnnnnnnnnnnnnnnnnnnnnnnnnnnnnnnnnnnnnnnnnnnnnnnnnnnnnnnnnnnnnnnnnnnnnnnnnnnnnnnnnnnnnnnnnnnnnnnnnnnnnnnnnnnnnnnnnnnnnnnnnnnnnnnnnnnnnnnnnnnnnnnnnnnnnnnnnnnnnnnnnnnnnnnnnnnnnnnnnnnnnnnnnnnnnnnnnnnnnnnnnnnnnnnnnnnnnnnnnnnnnnnnnnnnnnnnnnnnnnnnnnnnnnnnnnnnnnnnnnnnnnnnnnnnnnnnnnnnnnnnnnnnnnnnnnnnnnnnnnnnnnnnnnnnnnnnnnnnnnnnnnnnnnnnnnnnnnnnnnnnnnnnnnnnnnnnnnnnnnnnnnnnnnnnnnnnnnnnnnnnnnnnnnnnnnnnnnnnnnnnnnnnnnnnnnnnnnnnnnnnnnnnnnnnnnnnnnnnnnnnnnnnnnnnnnnnnnnnnnnnnnnnnnnnnnnnnnnnnnnnnnnnnnnnnnnnnnnnnnnnnnnnnnnnnnnnnnnnnnnnnnnnnnnnnnnnnnnnnnnnnnnnnnnnnnnnnnnnnnnnnnnnnnnnnnnnnnnnnnnnnnnnnnnnnnnnnnnnnnnnnnnnnnnnnnnnnnnnnnnnnnnnnnnnnnnnnnnnnnnnnnnnnnnnnnnnnnnnnnnnnnnnnnnnnnnnnnnnnnnnnnnnnnnnnnnnnnnnnnnnnnnnnnnnnnnnnnnnnnnnnnnnnnnnnnnnnnnnnnnnnnnnnnnnnnnnnnnnnnnnnnnnnnnnnnnnnnnnnnnnnnnnnnnnnnnnnnnnnnnnnnnnnnnnnnnnnnnnnnnnnnnnnnnnnnnnnnnnnnnnnnnnnnnnnnnnnnnnnnnnnnnnnnnnnnnnnnnnnnnnnnnnnnnnnnnnnnnnnnnnnnnnnnnnnnnnnnnnnnnnnnnnnnnnnnnnnnnnnnnnnnnnnnnnnnnnnnnnnnnnnnnnnnnnnnnnnnnnnnnnnnnnnnnnnnnnnnnnnnnnnnnnnnnnnnnnnnnnnnnnnnnnnnnnnnnnnnnnnnnnnnnnnnnnnnnnnnnnnnnnnnnnnnnnnnnnnnnnnnnnnnnnnnnnnnnnnnnnnnnnnnnnnnnnnnnnnnnnnnnnnnnnnnnnnnnnnnnnnnnnnnnnnnnnnnnnnnnnnnnnnnnnnnnnnnnnnnnnnnnnnnnnnnnnnnnnnnnnnnnnnnnnnnnnnnnnnnnnnnnnnnnnnnnnnnnnnnnnnnnnnnnnnnnnnnnnnnnnnnnnnnnnnnnnnnnnnnnnnnnnnnnnnnnnnnnnnnnnnnnnnnnnnnnnnnnnnnnnnnnnnnnnnnnnnnnnnnnnnnnnnnnnnnnnnnnnnnnnnnnnnnnnnnnnnnnnnnnnnnnnnnnnnnnnnnnnnnnnnnnnnnnnnnnnnnnnnnnnnnnnnnnnnnnnnnnnnnnnnnnnnnnnnnnnnnnnnnnnnnnnnnnnnnnnnnnnnnnnnnnnnnnnnnnnnnnnnnnnnnnnnnnnnnnnnnnnnnnnnnnnnnnnnnnnnnnnnnnnnnnnnnnnnnnnnnnnnnnnnnnnnnnnnnnnnnnnnnnnnnnnnnnnnnnnnnnnnnnnnnnnnnnnnnnnnnnnnnnnnnnnnnnnnnnnnnnnnnnnnnnnnnnnnnnnnnnnnnnnnnnnnnnnnnnnnnnnnnnnnnnnnnnnnnnnnnnnnnnnnnnnnnnnnnnnnnnnnnnnnnnnnnnnnnnnnnnnnnnnnnnnnnnnnnnnnnnnnnnnnnnnnnnnnnnnnnnnnnnnnnnnnnnnnnnnnnnnnnnnnnnnnnnnnnnnnnnnnnnnnnnnnnnnnnnnnnnnnnnnnnnnnnnnnnnnnnnnnnnnnnnnnnnnnnnnnnnnnnnnnnnnnnnnnnnnnnnnnnnnnnnnnnnnnnnnnnnnnnnnnnnnnnnnnnnnnnnnnnnnnnnnnnnnnnnnnnnnnnnnnnnnnnnnnnnnnnnnnnnnnnnnnnnnnnnnnnnnnnnnnnnnnnnnnnnnnnnnnnnnnnnnnnnnnnnnnnnnnnnnnnnnnnnnnnnnnnnnnnnnnnnnnnnnnnnnnnnnnnnnnnnnnnnnnnnnnnnnnnnnnnnnnnnnnnnnnnnnnnnnnnnnnnnnnnnnnnnnnnnnnnnnnnnnnnnnnnnnnnnnnnnnnnnnnnnnnnnnnnnnnnnnnnnnnnnnnnnnnnnnnnnnnnnnnnnnnnnnnnnnnnnnnnnnnnnnnnnnnnnnnnnnnnnnnnnnnnnnnnnnnnnnnnnnnnnnnnnnnnnnnnnnnnnnnnnnnnnnnnnnnnnnnnnnnnnnnnnnnnnnnnnnnnnnnnnnnnnnnnnnnnnnnnnnnnnnnnnnnnnnnnnnnnnnnnnnnnnnnnnnnnnnnnnnnnnnnnnnnnnnnnnnnnnnnnnnnnnnnnnnnnnnnnnnnnnnnnnnnnnnnnnnnnnnnnnnnnnnnnnnnnnnnnnnnnnnnnnnnnnnnnnnnnnnnnnnnnnnnnnnnnnnnnnnnnnnnnnnnnnnnnnnnnnnnnnnnnnnnnnnnnnnnnnnnnnnnnnnnnnnnnnnnnnnnnnnnnnnnnnnnnnnnnnnnnnnnnnnnnnnnnnnnnnnnnnnnnnnnnnnnnnnnnnnnnnnnnnnnnnnnnnnnnnnnnnnnnnnnnnnnnnnnnnnnnnnnnnnnnnnnnnnnnnnnnnnnnnnnnnnnnnnnnnnnnnnnnnnnnnnnnnnnnnnnnnnnnnnnnnnnnnnnnnnnnnnnnnnnnnnnnnnnnnnnnnnnnnnnnnnnnnnnnnnnnnnnnnnnnnnnnnnnnnnnnnnnnnnnnnnnnnnnnnnnnnnnnnnnnnnnnnnnnnnnnnnnnnnnnnnnnnnnnnnnnnnnnnnnnnnnnnnnnnnnnnnnnnnnnnnnnnnnnnnnnnnnnnnnnnnnnnnnnnnnnnnnnnnnnnnnnnnnnnnnnnnnnnnnnnnnnnnnnnnnnnnnnnnnnnnnnnnnnnnnnnnnnnnnnnnnnnnnnnnnnnnnnnnnnnnnnnnnnnnnnnnnnnnnnnnnnnnnnnnnnnnnnnnnnnnnnnnnnnnnnnnnnnnnnnnnnnnnnnnnnnnnnnnnnnnnnnnnnnnnnnnnnnnnnnnnnnnnnnnnnnnnnnnnnnnnnnnnnnnnnnnnnnnnnnnnnnnnnnnnnnnnnnnnnnnnnnnnnnnnnnnnnnnnnnnnnnnnnnnnnnnnnnnnnnnnnnnnnnnnnnnnnnnnnnnnnnnnnnnnnnnnnnnnnnnnnnnnnnnnnnnnnnnnnnnnnnnnnnnnnnnnnnnnnnnnnnnnnnnnnnnnnnnnnnnnnnnnnnnnnnnnnnnnnnnnnnnnnnnnnnnnnnnnnnnnnnnnnnnnnnnnnnnnnnnnnnnnnnnnnnnnnnnnnnnnnnnnnnnnnnnnnnnnnnnnnnnnnnnnnnnnnnnnnnnnnnnnnnnnnnnnnnnnnnnnnnnnnnnnnnnnnnnnnnnnnnnnnnnnnnnnnnnnnnnnnnnnnnnnnnnnnnnnnnnnnnnnnnnnnnnnnnnnnnnnnnnnnnnnnnnnnnnnnnnnnnnnnnnnnnnnnnnnnnnnnnnnnnnnnnnnnnnnnnnnnnnnnnnnnnnnnnnnnnnnnnnnnnnnnnnnnnnnnnnnnnnnnnnnnnnnnnnnnnnnnnnnnnnnnnnnnnnnnnnnnnnnnnnnnnnnnnnnnnnnnnnnnnnnnnnnnnnnnnnnnnnnnnnnnnnnnnnnnnnnnnnnnnnnnnnnnnnnnnnnnnnnnnnnnnnnnnnnnnnnnnnnnnnnnnnnnnnnnnnnnnnnnnnnnnnnnnnnnnnnnnnnnnnnnnnnnnnnnnnnnnnnnnnnnnnnnnnnnnnnnnnnnnnnnnnnnnnnnnnnnnnnnnnnnnnnnnnnnnnnnnnnnnnnnnnnnnnnnnnnnnnnnnnnnnnnnnnnnnnnnnnnnnnnnnnnnnnnnnnnnnnnnnnnnnnnnnnnnnnnnnnnnnnnnnnnnnnnnnnnnnnnnnnnnnnnnnnnnnnnnnnnnnnnnnnnnnnnnnnnnnnnnnnnnnnnnnnnnnnnnnnnnnnnnnnnnnnnnnnnnnnnnnnnnnnnnnnnnnnnnnnnnnnnnnnnnnnnnnnnnnnnnnnnnnnnnnnnnnnnnnnnnnnnnnnnnnnnnnnnnnnnnnnnnnnnnnnnnnnnnnnnnnnnnnnnnnnnnnnnnnnnnnnnnnnnnnnnnnnnnnnnnnnnnnnnnnnnnnnnnnnnnnnnnnnnnnnnnnnnnnnnnnnnnnnnnnnnnnnnnnnnnnnnnnnnnnnnnnnnnnnnnnnnnnnnnnnnnnnnnnnnnnnnnnnnnnnnnnnnnnnnnnnnnnnnnnnnnnnnnnnnnnnnnnnnnnnnnnnnnnnnnnnnnnnnnnnnnnnnnnnnnnnnnnnnnnnnnnnnnnnnnnnnnnnnnnnnnnnnnnnnnnnnnnnnnnnnnnnnnnnnnnnnnnnnnnnnnnnnnnnnnnnnnnnnnnnnnnnnnnnnnnnnnnnnnnnnnnnnnnnnnnnnnnnnnnnnnnnnnnnnnnnnnnnnnnnnnnnnnnnnnnnnnnnnnnnnnnnnnnnnnnnnnnnnnnnnnnnnnnnnnnnnnnnnnnnnnnnnnnnnnnnnnnnnnnnnnnnnnnnnnnnnnnnnnnnnnnnnnnnnnnnnnnnnnnnnnnnnnnnnnnnnnnnnnnnnnnnnnnnnnnnnnnnnnnnnnnnnnnnnnnnnnnnnnnnnnnnnnnnnnnnnnnnnnnnnnnnnnnnnnnnnnnnnnnnnnnnnnnnnnnnnnnnnnnnnnnnnnnnnnnnnnnnnnnnnnnnnnnnnnnnnnnnnnnnnnnnnnnnnnnnnnnnnnnnnnnnnnnnnnnnnnnnnnnnnnnnnnnnnnnnnnnnnnnnnnnnnnnnnnnnnnnnnnnnnnnnnnnnnnnnnnnnnnnnnnnnnnnnnnnnnnnnnnnnnnnnnnnnnnnnnnnnnnnnnnnnnnnnnnnnnnnnnnnnnnnnnnnnnnnnnnnnnnnnnnnnnnnnnnnnnnnnnnnnnnnnnnnnnnnnnnnnnnnnnnnnnnnnnnnnnnnnnnnnnnnnnnnnnnnnnnnnnnnnnnnnnnnnnnnnnnnnnnnnnnnnnnnnnnnnnnnnnnnnnnnnnnnnnnnnnnnnnnnnnnnnnnnnnnnnnnnnnnnnnnnnnnnnnnnnnnnnnnnnnnnnnnnnnnnnnnnnnnnnnnnnnnnnnnnnnnnnnnnnnnnnnnnnnnnnnnnnnnnnnnnnnnnnnnnnnnnnnnnnnnnnnnnnnnnnnnnnnnnnnnnnnnnnnnnnnnnnnnnnnnnnnnnnnnnnnnnnnnnnnnnnnnnnnnnnnnnnnnnnnnnnnnnnnnnnnnnnnnnnnnnnnnnnnnnnnnnnnnnnnnnnnnnnnnnnnnnnnnnnnnnnnnnnnnnnnnnnnnnnnnnnnnnnnnnnnnnnnnnnnnnnnnnnnnnnnnnnnnnnnnnnnnnnnnnnnnnnnnnnnnnnnnnnnnnnnnnnnnnnnnnnnnnnnnnnnnnnnnnnnnnnnnnnnnnnnnnnnnnnnnnnnnnnnnnnnnnnnnnnnnnnnnnnnnnnnnnnnnnnnnnnnnnnnnnnnnnnnnnnnnnnnnnnnnnnnnnnnnnnnnnnnnnnnnnnnnnnnnnnnnnnnnnnnnnnnnnnnnnnnnnnnnnnnnnnnnnnnnnnnnnnnnnnnnnnnnnnnnnnnnnnnnnnnnnnnnnnnnnnnnnnnnnnnnnnnnnnnnnnnnnnnnnnnnnnnnnnnnnnnnnnnnnnnnnnnnnnnnnnnnnnnnnnnnnnnnnnnnnnnnnnnnnnnnnnnnnnnnnnnnnnnnnnnnnnnnnnnnnnnnnnnnnnnnnnnnnnnnnnnnnnnnnnnnnnnnnnnnnnnnnnnnnnnnnnnnnnnnnnnnnnnnnnnnnnnnnnnnnnnnnnnnnnnnnnnnnnnnnnnnnnnnnnnnnnnnnnnnnnnnnnnnnnnnnnnnnnnnnnnnnnnnnnnnnnnnnnnnnnnnnnnnnnnnnnnnnnnnnnnnnnnnnnnnnnnnnnnnnnnnnnnnnnnnnnnnnnnnnnnnnnnnnnnnnnnnnnnnnnnnnnnnnnnnnnnnnnnnnnnnnnnnnnnnnnnnnnnnnnnnnnnnnnnnnnnnnnnnnnnnnnnnnnnnnnnnnnnnnnnnnnnnnnnnnnnnnnnnnnnnnnnnnnnnnnnnnnnnnnnnnnnnnnnnnnnnnnnnnnnnnnnnnnnnnnnnnnnnnnnnnnnnnnnnnnnnnnnnnnnnnnnnnnnnnnnnnnnnnnnnnnnnnnnnnnnnnnnnnnnnnnnnnnnnnnnnnnnnnnnnnnnnnnnnnnnnnnnnnnnnnnnnnnnnnnnnnnnnnnnnnnnnnnnnnnnnnnnnnnnnnnnnnnnnnnnnnnnnnnnnnnnnnnnnnnnnnnnnnnnnnnnnnnnnnnnnnnnnnnnnnnnnnnnnnnnnnnnnnnnnnnnnnnnnnnnnnnnnnnnnnnnnnnnnnnnnnnnnnnnnnnnnnnnnnnnnnnnnnnnnnnnnnnnnnnnnnnnnnnnnnnnnnnnnnnnnnnnnnnnnnnnnnnnnnnnnnnnnnnnnnnnnnnnnnnnnnnnnnnnnnnnnnnnnnnnnnnnnnnnnnnnnnnnnnnnnnnnnnnnnnnnnnnnnnnnnnnnnnnnnnnnnnnnnnnnnnnnnnnnnnnnnnnnnnnnnnnnnnnnnnnnnnnnnnnnnnnnnnnnnnnnnnnnnnnnnnnnnnnnnnnnnnnnnnnnnnnnnnnnnnnnnnnnnnnnnnnnnnnnnnnnnnnnnnnnnnnnnnnnnnnnnnnnnnnnnnnnnnnnnnnnnnnnnnnnnnnnnnnnnnnnnnnnnnnnnnnnnnnnnnnnnnnnnnnnnnnnnnnnnnnnnnnnnnnnnnnnnnnnnnnnnnnnnnnnnnnnnnnnnnnnnnnnnnnnnnnnnnnnnnnnnnnnnnnnnnnnnnnnnnnnnnnnnnnnnnnnnnnnnnnnnnnnnnnnnnnnnnnnnnnnnnnnnnnnnnnnnnnnnnnnnnnnnnnnnnnnnnnnnnnnnnnnnnnnnnnnnnnnnnnnnnnnnnnnnnnnnnnnnnnnnnnnnnnnnnnnnnnnnnnnnnnnnnnnnnnnnnnnnnnnnnnnnnnnnnnnnnnnnnnnnnnnnnnnnnnnnnnnnnnnnnnnnnnnnnnnnnnnnnnnnnnnnnnnnnnnnnnnnnnnnnnnnnnnnnnnnnnnnnnnnnnnnnnnnnnnnnnnnnnnnnnnnnnnnnnnnnnnnnnnnnnnnnnnnnnnnnnnnnnnnnnnnnnnnnnnnnnnnnnnnnnnnnnnnnnnnnnnnnnnnnnnnnnnnnnnnnnnnnnnnnnnnnnnnnnnnnnnnnnnnnnnnnnnnnnnnnnnnnnnnnnnnnnnnnnnnnnnnnnnnnnnnnnnnnnnnnnnnnnnnnnnnnnnnnnnnnnnnnnnnnnnnnnnnnnnnnnnnnnnnnnnnnnnnnnnnnnnnnnnnnnnnnnnnnnnnnnnnnnnnnnnnnnnnnnnnnnnnnnnnnnnnnnnnnnnnnnnnnnnnnnnnnnnnnnnnnnnnnnnnnnnnnnnnnnnnnnnnnnnnnnnnnnnnnnnnnnnnnnnnnnnnnnnnnnnnnnnnnnnnnnnnnnnnnnnnnnnnnnnnnnnnnnnnnnnnnnnnnnnnnnnnnnnnnnnnnnnnnnnnnnnnnnnnnnnnnnnnnnnnnnnnnnnnnnnnnnnnnnnnnnnnnnnnnnnnnnnnnnnnnnnnnnnnnnnnnnnnnnnnnnnnnnnnnnnnnnnnnnnnnnnnnnnnnnnnnnnnnnnnnnnnnnnnnnnnnnnnnnnnnnnnnnnnnnnnnnnnnnnnnnnnnnnnnnnnnnnnnnnnnnnnnnnnnnnnnnnnnnnnnnnnnnnnnnnnnnnnnnnnnnnnnnnnnnnnnnnnnnnnnnnnnnnnnnnnnnnnnnnnnnnnnnnnnnnnnnnnnnnnnnnnnnnnnnnnnnnnnnnnnnnnnnnnnnnnnnnnnnnnnnnnnnnnnnnnnnnnnnnnnnnnnnnnnnnnnnnnnnnnnnnnnnnnnnnnnnnnnnnnnnnnnnnnnnnnnnnnnnnnnnnnnnnnnnnnnnnnnnnnnnnnnnnnnnnnnnnnnnnnnnnnnnnnnnnnnnnnnnnnnnnnnnnnnnnnnnnnnnnnnnnnnnnnnnnnnnnnnnnnnnnnnnnnnnnnnnnnnnnnnnnnnnnnnnnnnnnnnnnnnnnnnnnnnnnnnnnnnnnnnnnnnnnnnnnnnnnnnnnnnnnnnnnnnnnnnnnnnnnnnnnnnnnnnnnnnnnnnnnnnnnnnnnnnnnnnnnnnnnnnnnnnnnnnnnnnnnnnnnnnnnnnnnnnnnnnnnnnnnnnnnnnnnnnnnnnnnnnnnnnnnnnnnnnnnnnnnnnnnnnnnnnnnnnnnnnnnnnnnnnnnnnnnnnnnnnnnnnnnnnnnnnnnnnnnnnnnnnnnnnnnnnnnnnnnnnnnnnnnnnnnnnnnnnnnnnnnnnnnnnnnnnnnnnnnnnnnnnnnnnnnnnnnnnnnnnnnnnnnnnnnnnnnnnnnnnnnnnnnnnnnnnnnnnnnnnnnnnnnnnnnnnnnnnnnnnnnnnnnnnnnnnnnnnnnnnnnnnnnnnnnnnnnnnnnnnnnnnnnnnnnnnnnnnnnnnnnnnnnnnnnnnnnnnnnnnnnnnnnnnnnnnnnnnnnnnnnnnnnnnnnnnnnnnnnnnnnnnnnnnnnnnnnnnnnnnnnnnnnnnnnnnnnnnnnnnnnnnnnnnnnnnnnnnnnnnnnnnnnnnnnnnnnnnnnnnnnnnnnnnnnnnnnnnnnnnnnnnnnnnnnnnnnnnnnnnnnnnnnnnnnnnnnnnnnnnnnnnnnnnnnnnnnnnnnnnnnnnnnnnnnnnnnnnnnnnnnnnnnnnnnnnnnnnnnnnnnnnnnnnnnnnnnnnnnnnnnnnnnnnnnnnnnnnnnnnnnnnnnnnnnnnnnnnnnnnnnnnnnnnnnnnnnnnnnnnnnnnnnnnnnnnnnnnnnnnnnnnnnnnnnnnnnnnnnnnnnnnnnnnnnnnnnnnnnnnnnnnnnnnnnnnnnnnnnnnnnnnnnnnnnnnnnnnnnnnnnnnnnnnnnnnnnnnnnnnnnnnnnnnnnnnnnnnnnnnnnnnnnnnnnnnnnnnnnnnnnnnnnnnnnnnnnnnnnnnnnnnnnnnnnnnnnnnnnnnnnnnnnnnnnnnnnnnnnnnnnnnnnnnnnnnnnnnnnnnnnnnnnnnnnnnnnnnnnnnnnnnnnnnnnnnnnnnnnnnnnnnnnnnnnnnnnnnnnnnnnnnnnnnnnnnnnnnnnnnnnnnnnnnnnnnnnnnnnnnnnnnnnnnnnnnnnnnnnnnnnnnnnnnnnnnnnnnnnnnnnnnnnnnnnnnnnnnnnnnnnnnnnnnnnnnnnnnnnnnnnnnnnnnnnnnnnnnnnnnnnnnnnnnnnnnnnnnnnnnnnnnnnnnnnnnnnnnnnnnnnnnnnnnnnnnnnnnnnnnnnnnnnnnnnnnnnnnnnnnnnnnnnnnnnnnnnnnnnnnnnnnnnnnnnnnnnnnnnnnnnnnnnnnnnnnnnnnnnnnnnnnnnnnnnnnnnnnnnnnnnnnnnnnnnnnnnnnnnnnnnnnnnnnnnnnnnnnnnnnnnnnnnnnnnnnnnnnnnnnnnnnnnnnnnnnnnnnnnnnnnnnnnnnnnnnnnnnnnnnnnnnnnnnnnnnnnnnnnnnnnnnnnnnnnnnnnnnnnnnnnnnnnnnnnnnnnnnnnnnnnnnnnnnnnnnnnnnnnnnnnnnnnnnnnnnnnnnnnnnnnnnnnnnnnnnnnnnnnnnnnnnnnnnnnnnnnnnnnnnnnnnnnnnnnnnnnnnnnnnnnnnnnnnnnnnnnnnnnnnnnnnnnnnnnnnnnnnnnnnnnnnnnnnnnnnnnnnnnnnnnnnnnnnnnnnnnnnnnnnnnnnnnnnnnnnnnnnnnnnnnnnnnnnnnnnnnnnnnnnnnnnnnnnnnnnnnnnnnnnnnnnnnnnnnnnnnnnnnnnnnnnnnnnnnnnnnnnnnnnnnnnnnnnnnnnnnnnnnnnnnnnnnnnnnnnnnnnnnnnnnnnnnnnnnnnnnnnnnnnnnnnnnnnnnnnnnnnnnnnnnnnnnnnnnnnnnnnnnnnnnnnnnnnnnnnnnnnnnnnnnnnnnnnnnnnnnnnnnnnnnnnnnnnnnnnnnnnnnnnnnnnnnnnnnnnnnnnnnnnnnnnnnnnnnnnnnnnnnnnnnnnnnnnnnnnnnnnnnnnnnnnnnnnnnnnnnnnnnnnnnnnnnnnnnnnnnnnnnnnnnnnnnnnnnnnnnnnnnnnnnnnnnnnnnnnnnnnnnnnnnnnnnnnnnnnnnnnnnnnnnnnnnnnnnnnnnnnnnnnnnnnnnnnnnnnnnnnnnnnnnnnnnnnnnnnnnnnnnnnnnnnnnnnnnnnnnnnnnnnnnnnnnnnnnnnnnnnnnnnnnnnnnnnnnnnnnnnnnnnnnnnnnnnnnnnnnnnnnnnnnnnnnnnnnnnnnnnnnnnnnnnnnnnnnnnnnnnnnnnnnnnnnnnnnnnnnnnnnnnnnnnnnnnnnnnnnnnnnnnnnnnnnnnnnnnnnnnnnnnnnnnnnnnnnnnnnnnnnnnnnnnnnnnnnnnnnnnnnnnnnnnnnnnnnnnnnnnnnnnnnnnnnnnnnnnnnnnnnnnnnnnnnnnnnnnnnnnnnnnnnnnnnnnnnnnnnnnnnnnnnnnnnnnnnnnnnnnnnnnnnnnnnnnnnnnnnnnnnnnnnnnnnnnnnnnnnnnnnnnnnnnnnnnnnnnnnnnnnnnnnnnnnnnnnnnnnnnnnnnnnnnnnnnnnnnnnnnnnnnnnnnnnnnnnnnnnnnnnnnnnnnnnnnnnnnnnnnnnnnnnnnnnnnnnnnnnnnnnnnnnnnnnnnnnnnnnnnnnnnnnnnnnnnnnnnnnnnnnnnnnnnnnnnnnnnnnnnnnnnnnnnnnnnnnnnnnnnnnnnnnnnnnnnnnnnnnnnnnnnnnnnnnnnnnnnnnnnnnnnnnnnnnnnnnnnnnnnnnnnnnnnnnnnnnnnnnnnnnnnnnnnnnnnnnnnnnnnnnnnnnnnnnnnnnnnnnnnnnnnnnnnnnnnnnnnnnnnnnnnnnnnnnnnnnnnnnnnnnnnnnnnnnnnnnnnnnnnnnnnnnnnnnnnnnnnnnnnnnnnnnnnnnnnnnnnnnnnnnnnnnnnnnnnnnnnnnnnnnnnnnnnnnnnnnnnnnnnnnnnnnnnnnnnnnnnnnnnnnnnnnnnnnnnnnnnnnnnnnnnnnnnnnnnnnnnnnnnnnnnnnnnnnnnnnnnnnnnnnnnnnnnnnnnnnnnnnnnnnnnnnnnnnnnnnnnnnnnnnnnnnnnnnnnnnnnnnnnnnnnnnnnnnnnnnnnnnnnnnnnnnnnnnnnnnnnnnnnnnnnnnnnnnnnnnnnnnnnnnnnnnnnnnnnnnnnnnnnnnnnnnnnnnnnnnnnnnnnnnnnnnnnnnnnnnnnnnnnnnnnnnnnnnnnnnnnnnnnnnnnnnnnnnnnnnnnnnnnnnnnnnnnnnnnnnnnnnnnnnnnnnnnnnnnnnnnnnnnnnnnnnnnnnnnnnnnnnnnnnnnnnnnnnnnnnnnnnnnnnnnnnnnnnnnnnnnnnnnnnnnnnnnnnnnnnnnnnnnnnnnnnnnnnnnnnnnnnnnnnnnnnnnnnnnnnnnnnnnnnnnnnnnnnnnnnnnnnnnnnnnnnnnnnnnnnnnnnnnnnnnnnnnnnnnnnnnnnnnnnnnnnnnnnnnnnnnnnnnnnnnnnnnnnnnnnnnnnnnnnnnnnnnnnnnnnnnnnnnnnnnnnnnnnnnnnnnnnnnnnnnnnnnnnnnnnnnnnnnnnnnnnnnnnnnnnnnnnnnnnnnnnnnnnnnnnnnnnnnnnnnnnnnnnnnnnnnnnnnnnnnnnnnnnnnnnnnnnnnnnnnnnnnnnnnnnnnnnnnnnnnnnnnnnnnnnnnnnnnnnnnnnnnnnnnnnnnnnnnnnnnnnnnnnnnnnnnnnnnnnnnnnnnnnnnnnnnnnnnnnnnnnnnnnnnnnnnnnnnnnnnnnnnnnnnnnnnnnnnnnnnnnnnnnnnnnnnnnnnnnnnnnnnnnnnnnnnnnnnnnnnnnnnnnnnnnnnnnnnnnnnnnnnnnnnnnnnnnnnnnnnnnnnnnnnnnnnnnnnnnnnnnnnnnnnnnnnnnnnnnnnnnnnnnnnnnnnnnnnnnnnnnnnnnnnnnnnnnnnnnnnnnnnnnnnnnnnnnnnnnnnnnnnnnnnnnnnnnnnnnnnnnnnnnnnnnnnnnnnnnnnnnnnnnnnnnnnnnnnnnnnnnnnnnnnnnnnnnnnnnnnnnnnnnnnnnnnnnnnnnnnnnnnnnnnnnnnnnnnnnnnnnnnnnnnnnnnnnnnnnnnnnnnnnnnnnnnnnnnnnnnnnnnnnnnnnnnnnnnnnnnnnnnnnnnnnnnnnnnnnnnnnnnnnnnnnnnnnnnnnnnnnnnnnnnnnnnnnnnnnnnnnnnnnnnnnnnnnnnnnnnnnnnnnnnnnnnnnnnnnnnnnnnnnnnnnnnnnnnnnnnnnnnnnnnnnnnnnnnnnnnnnnnnnnnnnnnnnnnnnnnnnnnnnnnnnnnnnnnnnnnnnnnnnnnnnnnnnnnnnnnnnnnnnnnnnnnnnnnnnnnnnnnnnnnnnnnnnnnnnnnnnnnnnnnnnnnnnnnnnnnnnnnnnnnnnnnnnnnnnnnnnnnnnnnnnnnnnnnnnnnnnnnnnnnnnnnnnnnnnnnnnnnnnnnnnnnnnnnnnnnnnnnnnnnnnnnnnnnnnnnnnnnnnnnnnnnnnnnnnnnnnnnnnnnnnnnnnnnnnnnnnnnnnnnnnnnnnnnnnnnnnnnnnnnnnnnnnnnnnnnnnnnnnnnnnnnnnnnnnnnnnnnnnnnnnnnnnnnnnnnnnnnnnnnnnnnnnnnnnnnnnnnnnnnnnnnnnnnnnnnnnnnnnnnnnnnnnnnnnnnnnnnnnnnnnnnnnnnnnnnnnnnnnnnnnnnnnnnnnnnnnnnnnnnnnnnnnnnnnnnnnnnnnnnnnnnnnnnnnnnnnnnnnnnnnnnnnnnnnnnnnnnnnnnnnnnnnnnnnnnnnnnnnnnnnnnnnnnnnnnnnnnnnnnnnnnnnnnnnnnnnnnnnnnnnnnnnnnnnnnnnnnnnnnnnnnnnnnnnnnnnnnnnnnnnnnnnnnnnnnnnnnnnnnnnnnnnnnnnnnnnnnnnnnnnnnnnnnnnnnnnnnnnnnnnnnnnnnnnnnnnnnnnnnnnnnnnnnnnnnnnnnnnnnnnnnnnnnnnnnnnnnnnnnnnnnnnnnnnnnnnnnnnnnnnnnnnnnnnnnnnnnnnnnnnnnnnnnnnnnnnnnnnnnnnnnnnnnnnnnnnnnnnnnnnnnnnnnnnnnnnnnnnnnnnnnnnnnnnnnnnnnnnnnnnnnnnnnnnnnnnnnnnnnnnnnnnnnnnnnnnnnnnnnnnnnnnnnnnnnnnnnnnnnnnnnnnnnnnnnnnnnnnnnnnnnnnnnnnnnnnnnnnnnnnnnnnnnnnnnnnnnnnnnnnnnnnnnnnnnnnnnnnnnnnnnnnnnnnnnnnnnnnnnnnnnnnnnnnnnnnnnnnnnnnnnnnnnnnnnnnnnnnnnnnnnnnnnnnnnnnnnnnnnnnnnnnnnnnnnnnnnnnnnnnnnnnnnnnnnnnnnnnnnnnnnnnnnnnnnnnnnnnnnnnnnnnnnnnnnnnnnnnnnnnnnnnnnnnnnnnnnnnnnnnnnnnnnnnnnnnnnnnnnnnnnnnnnnnnnnnnnnnnnnnnnnnnnnnnnnnnnnnnnnnnnnnnnnnnnnnnnnnnnnnnnnnnnnnnnnnnnnnnnnnnnnnnnnnnnnnnnnnnnnnnnnnnnnnnnnnnnnnnnnnnnnnnnnnnnnnnnnnnnnnnnnnnnnnnnnnnnnnnnnnnnnnnnnnnnnnnnnnnnnnnnnnnnnnnnnnnnnnnnnnnnnnnnnnnnnnnnnnnnnnnnnnnnnnnnnnnnnnnnnnnnnnnnnnnnnnnnnnnnnnnnnnnnnnnnnnnnnnnnnnnnnnnnnnnnnnnnnnnnnnnnnnnnnnnnnnnnnnnnnnnnnnnnnnnnnnnnnnnnnnnnnnnnnnnnnnnnnnnnnnnnnnnnnnnnnnnnnnnnnnnnnnnnnnnnnnnnnnnnnnnnnnnnnnnnnnnnnnnnnnnnnnnnnnnnnnnnnnnnnnnnnnnnnnnnnnnnnnnnnnnnnnnnnnnnnnnnnnnnnnnnnnnnnnnnnnnnnnnnnnnnnnnnnnnnnnnnnnnnnnnnnnnnnnnnnnnnnnnnnnnnnnnnnnnnnnnnnnnnnnnnnnnnnnnnnnnnnnnnnnnnnnnnnnnnnnnnnnnnnnnnnnnnnnnnnnnnnnnnnnnnnnnnnnnnnnnnnnnnnnnnnnnnnnnnnnnnnnnnnnnnnnnnnnnnnnnnnnnnnnnnnnnnnnnnnnnnnnnnnnnnnnnnnnnnnnnnnnnnnnnnnnnnnnnnnnnnnnnnnnnnnnnnnnnnnnnnnnnnnnnnnnnnnnnnnnnnnnnnnnnnnnnnnnnnnnnnnnnnnnnnnnnnnnnnnnnnnnnnnnnnnnnnnnnnnnnnnnnnnnnnnnnnnnnnnnnnnnnnnnnnnnnnnnnnnnnnnnnnnnnnnnnnnnnnnnnnnnnnnnnnnnnnnnnnnnnnnnnnnnnnnnnnnnnnnnnnnnnnnnnnnnnnnnnnnnnnnnnnnnnnnnnnnnnnnnnnnnnnnnnnnnnnnnnnnnnnnnnnnnnnnnnnnnnnnnnnnnnnnnnnnnnnnnnnnnnnnnnnnnnnnnnnnnnnnnnnnnnnnnnnnnnnnnnnnnnnnnnnnnnnnnnnnnnnnnnnnnnnnnnnnnnnnnnnnnnnnnnnnnnnnnnnnnnnnnnnnnnnnnnnnnnnnnnnnnnnnnnnnnnnnnnnnnnnnnnnnnnnnnnnnnnnnnnnnnnnnnnnnnnnnnnnnnnnnnnnnnnnnnnnnnnnnnnnnnnnnnnnnnnnnnnnnnnnnnnnnnnnnnnnnnnnnnnnnnnnnnnnnnnnnnnnnnnnnnnnnnnnnnnnnnnnnnnnnnnnnnnnnnnnnnnnnnnnnnnnnnnnnnnnnnnnnnnnnnnnnnnnnnnnnnnnnnnnnnnnnnnnnnnnnnnnnnnnnnnnnnnnnnnnnnnnnnnnnnnnnnnnnnnnnnnnnnnnnnnnnnnnnnnnnnnnnnnnnnnnnnnnnnnnnnnnnnnnnnnnnnnnnnnnnnnnnnnnnnnnnnnnnnnnnnnnnnnnnnnnnnnnnnnnnnnnnnnnnnnnnnnnnnnnnnnnnnnnnnnnnnnnnnnnnnnnnnnnnnnnnnnnnnnnnnnnnnnnnnnnnnnnnnnnnnnnnnnnnnnnnnnnnnnnnnnnnnnnnnnnnnnnnnnnnnnnnnnnnnnnnnnnnnnnnnnnnnnnnnnnnnnnnnnnnnnnnnnnnnnnnnnnnnnnnnnnnnnnnnnnnnnnnnnnnnnnnnnnnnnnnnnnnnnnnnnnnnnnnnnnnnnnnnnnnnnnnnnnnnnnnnnnnnnnnnnnnnnnnnnnnnnnnnnnnnnnnnnnnnnnnnnnnnnnnnnnnnnnnnnnnnnnnnnnnnnnnnnnnnnnnnnnnnnnnnnnnnnnnnnnnnnnnnnnnnnnnnnnnnnnnnnnnnnnnnnnnnnnnnnnnnnnnnnnnnnnnnnnnnnnnnnnnnnnnnnnnnnnnnnnnnnnnnnnnnnnnnnnnnnnnnnnnnnnnnnnnnnnnnnnnnnnnnnnnnnnnnnnnnnnnnnnnnnnnnnnnnnnnnnnnnnnnnnnnnnnnnnnnnnnnnnnnnnnnnnnnnnnnnnnnnnnnnnnnnnnnnnnnnnnnnnnnnnnnnnnnnnnnnnnnnnnnnnnnnnnnnnnnnnnnnnnnnnnnnnnnnnnnnnnnnnnnnnnnnnnnnnnnnnnnnnnnnnnnnnnnnnnnnnnnnnnnnnnnnnnnnnnnnnnnnnnnnnnnnnnnnnnnnnnnnnnnnnnnnnnnnnnnnnnnnnnnnnnnnnnnnnnnnnnnnnnnnnnnnnnnnnnnnnnnnnnnnnnnnnnnnnnnnnnnnnnnnnnnnnnnnnnnnnnnnnnnnnnnnnnnnnnnnnnnnnnnnnnnnnnnnnnnnnnnnnnnnnnnnnnnnnnnnnnnnnnnnnnnnnnnnnnnnnnnnnnnnnnnnnnnnnnnnnnnnnnnnnnnnnnnnnnnnnnnnnnnnnnnnnnnnnnnnnnnnnnnnnnnnnnnnnnnnnnnnnnnnnnnnnnnnnnnnnnnnnnnnnnnnnnnnnnnnnnnnnnnnnnnnnnnnnnnnnnnnnnnnnnnnnnnnnnnnnnnnnnnnnnnnnnnnnnnnnnnnnnnnnnnnnnnnnnnnnnnnnnnnnnnnnnnnnnnnnnnnnnnnnnnnnnnnnnnnnnnnnnnnnnnnnnnnnnnnnnnnnnnnnnnnnnnnnnnnnnnnnnnnnnnnnnnnnnnnnnnnnnnnnnnnnnnnnnnnnnnnnnnnnnnnnnnnnnnnnnnnnnnnnnnnnnnnnnnnnnnnnnnnnnnnnnnnnnnnnnnnnnnnnnnnnnnnnnnnnnnnnnnnnnnnnnnnnnnnnnnnnnnnnnnnnnnnnnnnnnnnnnnnnnnnnnnnnnnnnnnnnnnnnnnnnnnnnnnnnnnnnnnnnnnnnnnnnnnnnnnnnnnnnnnnnnnnnnnnnnnnnnnnnnnnnnnnnnnnnnnnnnnnnnnnnnnnnnnnnnnnnnnnnnnnnnnnnnnnnnnnnnnnnnnnnnnnnnnnnnnnnnnnnnnnnnnnnnnnnnnnnnnnnnnnnnnnnnnnnnnnnnnnnnnnnnnnnnnnnnnnnnnnnnnnnnnnnnnnnnnnnnnnnnnnnnnnnnnnnnnnnnnnnnnnnnnnnnnnnnnnnnnnnnnnnnnnnnnnnnnnnnnnnnnnnnnnnnnnnnnnnnnnnnnnnnnnnnnnnnnnnnnnnnnnnnnnnnnnnnnnnnnnnnnnnnnnnnnnnnnnnnnnnnnnnnnnnnnnnnnnnnnnnnnnnnnnnnnnnnnnnnnnnnnnnnnnnnnnnnnnnnnnnnnnnnnnnnnnnnnnnnnnnnnnnnnnnnnnnnnnnnnnnnnnnnnnnnnnnnnnnnnnnnnnnnnnnnnnnnnnnnnnnnnnnnnnnnnnnnnnnnnnnnnnnnnnnnnnnnnnnnnnnnnnnnnnnnnnnnnnnnnnnnnnnnnnnnnnnnnnnnnnnnnnnnnnnnnnnnnnnnnnnnnnnnnnnnnnnnnnnnnnnnnnnnnnnnnnnnnnnnnnnnnnnnnnnnnnnnnnnnnnnnnnnnnnnnnnnnnnnnnnnnnnnnnnnnnnnnnnnnnnnnnnnnnnnnnnnnnnnnnnnnnnnnnnnnnnnnnnnnnnnnnnnnnnnnnnnnnnnnnnnnnnnnnnnnnnnnnnnnnnnnnnnnnnnnnnnnnnnnnnnnnnnnnnnnnnnnnnnnnnnnnnnnnnnnnnnnnnnnnnnnnnnnnnnnnnnnnnnnnnnnnnnnnnnnnnnnnnnnnnnnnnnnnnnnnnnnnnnnnnnnnnnnnnnnnnnnnnnnnnnnnnnnnnnnnnnnnnnnnnnnnnnnnnnnnnnnnnnnnnnnnnnnnnnnnnnnnnnnnnnnnnnnnnnnnnnnnnnnnnnnnnnnnnnnnnnnnnnnnnnnnnnnnnnnnnnnnnnnnnnnnnnnnnnnnnnnnnnnnnnnnnnnnnnnnnnnnnnnnnnnnnnnnnnnnnnnnnnnnnnnnnnnnnnnnnnnnnnnnnnnnnnnnnnnnnnnnnnnnnnnnnnnnnnnnnnnnnnnnnnnnnnnnnnnnnnnnnnnnnnnnnnnnnnnnnnnnnnnnnnnnnnnnnnnnnnnnnnnnnnnnnnnnnnnnnnnnnnnnnnnnnnnnnnnnnnnnnnnnnnnnnnnnnnnnnnnnnnnnnnnnnnnnnnnnnnnnnnnnnnnnnnnnnnnnnnnnnnnnnnnnnnnnnnnnnnnnnnnnnnnnnnnnnnnnnnnnnnnnnnnnnnnnnnnnnnnnnnnnnnnnnnnnnnnnnnnnnnnnnnnnnnnnnnnnnnnnnnnnnnnnnnnnnnnnnnnnnnnnnnnnnnnnnnnnnnnnnnnnnnnnnnnnnnnnnnnnnnnnnnnnnnnnnnnnnnnnnnnnnnnnnnnnnnnnnnnnnnnnnnnnnnnnnnnnnnnnnnnnnnnnnnnnnnnnnnnnnnnnnnnnnnnnnnnnnnnnnnnnnnnnnnnnnnnnnnnnnnnnnnnnnnnnnnnnnnnnnnnnnnnnnnnnnnnnnnnnnnnnnnnnnnnnnnnnnnnnnnnnnnnnnnnnnnnnnnnnnnnnnnnnnnnnnnnnnnnnnnnnnnnnnnnnnnnnnnnnnnnnnnnnnnnnnnnnnnnnnnnnnnnnnnnnnnnnnnnnnnnnnnnnnnnnnnnnnnnnnnnnnnnnnnnnnnnnnnnnnnnnnnnnnnnnnnnnnnnnnnnnnnnnnnnnnnnnnnnnnnnnnnnnnnnnnnnnnnnnnnnnnnnnnnnnnnnnnnnnnnnnnnnnnnnnnnnnnnnnnnnnnnnnnnnnnnnnnnnnnnnnnnnnnnnnnnnnnnnnnnnnnnnnnnnnnnnnnnnnnnnnnnnnnnnnnnnnnnnnnnnnnnnnnnnnnnnnnnnnnnnnnnnnnnnnnnnnnnnnnnnnnnnnnnnnnnnnnnnnnnnnnnnnnnnnnnnnnnnnnnnnnnnnnnnnnnnnnnnnnnnnnnnnnnnnnnnnnnnnnnnnnnnnnnnnnnnnnnnnnnnnnnnnnnnnnnnnnnnnnnnnnnnnnnnnnnnnnnnnnnnnnnnnnnnnnnnnnnnnnnnnnnnnnnnnnnnnnnnnnnnnnnnnnnnnnnnnnnnnnnnnnnnnnnnnnnnnnnnnnnnnnnnnnnnnnnnnnnnnnnnnnnnnnnnnnnnnnnnnnnnnnnnnnnnnnnnnnnnnnnnnnnnnnnnnnnnnnnnnnnnnnnnnnnnnnnnnnnnnnnnnnnnnnnnnnnnnnnnnnnnnnnnnnnnnnnnnnnnnnnnnnnnnnnnnnnnnnnnnnnnnnnnnnnnnnnnnnnnnnnnnnnnnnnnnnnnnnnnnnnnnnnnnnnnnnnnnnnnnnnnnnnnnnnnnnnnnnnnnnnnnnnnnnnnnnnnnnnnnnnnnnnnnnnnnnnnnnnnnnnnnnnnnnnnnnnnnnnnnnnnnnnnnnnnnnnnnnnnnnnnnnnnnnnnnnnnnnnnnnnnnnnnnnnnnnnnnnnnnnnnnnnnnnnnnnnnnnnnnnnnnnnnnnnnnnnnnnnnnnnnnnnnnnnnnnnnnnnnnnnnnnnnnnnnnnnnnnnnnnnnnnnnnnnnnnnnnnnnnnnnnnnnnnnnnnnnnnnnnnnnnnnnnnnnnnnnnnnnnnnnnnnnnnnnnnnnnnnnnnnnnnnnnnnnnnnnnnnnnnnnnnnnnnnnnnnnnnnnnnnnnnnnnnnnnnnnnnnnnnnnnnnnnnnnnnnnnnnnnnnnnnnnnnnnnnnnnnnnnnnnnnnnnnnnnnnnnnnnnnnnnnnnnnnnnnnnnnnnnnnnnnnnnnnnnnnnnnnnnnnnnnnnnnnnnnnnnnnnnnnnnnnnnnnnnnnnnnnnnnnnnnnnnnnnnnnnnnnnnnnnnnnnnnnnnnnnnnnnnnnnnnnnnnnnnnnnnnnnnnnnnnnnnnnnnnnnnnnnnnnnnnnnnnnnnnnnnnnnnnnnnnnnnnnnnnnnnnnnnnnnnnnnnnnnnnnnnnnnnnnnnnnnnnnnnnnnnnnnnnnnnnnnnnnnnnnnnnnnnnnnnnnnnnnnnnnnnnnnnnnnnnnnnnnnnnnnnnnnnnnnnnnnnnnnnnnnnnnnnnnnnnnnnnnnnnnnnnnnnnnnnnnnnnnnnnnnnnnnnnnnnnnnnnnnnnnnnnnnnnnnnnnnnnnnnnnnnnnnnnnnnnnnnnnnnnnnnnnnnnnnnnnnnnnnnnnnnnnnnnnnnnnnnnnnnnnnnnnnnnnnnnnnnnnnnnnnnnnnnnnnnnnnnnnnnnnnnnnnnnnnnnnnnnnnnnnnnnnnnnnnnnnnnnnnnnnnnnnnnnnnnnnnnnnnnnnnnnnnnnnnnnnnnnnnnnnnnnnnnnnnnnnnnnnnnnnnnnnnnnnnnnnnnnnnnnnnnnnnnnnnnnnnnnnnnnnnnnnnnnnnnnnnnnnnnnnnnnnnnnnnnnnnnnnnnnnnnnnnnnnnnnnnnnnnnnnnnnnnnnnnnnnnnnnnnnnnnnnnnnnnnnnnnnnnnnnnnnnnnnnnnnnnnnnnnnnnnnnnnnnnnnnnnnnnnnnnnnnnnnnnnnnnnnnnnnnnnnnnnnnnnnnnnnnnnnnnnnnnnnnnnnnnnnnnnnnnnnnnnnnnnnnnnnnnnnnnnnnnnnnnnnnnnnnnnnnnnnnnnnnnnnnnnnnnnnnnnnnnnnnnnnnnnnnnnnnnnnnnnnnnnnnnnnnnnnnnnnnnnnnnnnnnnnnnnnnnnnnnnnnnnnnnnnnnnnnnnnnnnnnnnnnnnnnnnnnnnnnnnnnnnnnnnnnnnnnnnnnnnnnnnnnnnnnnnnnnnnnnnnnnnnnnnnnnnnnnnnnnnnnnnnnnnnnnnnnnnnnnnnnnnnnnnnnnnnnnnnnnnnnnnnnnnnnnnnnnnnnnnnnnnnnnnnnnnnnnnnnnnnnnnnnnnnnnnnnnnnnnnnnnnnnnnnnnnnnnnnnnnnnnnnnnnnnnnnnnnnnnnnnnnnnnnnnnnnnnnnnnnnnnnnnnnnnnnnnnnnnnnnnnnnnnnnnnnnnnnnnnnnnnnnnnnnnnnnnnnnnnnnnnnnnnnnnnnnnnnnnnnnnnnnnnnnnnnnnnnnnnnnnnnnnnnnnnnnnnnnnnnnnnnnnnnnnnnnnnnnnnnnnnnnnnnnnnnnnnnnnnnnnnnnnnnnnnnnnnnnnnnnnnnnnnnnnnnnnnnnnnnnnnnnnnnnnnnnnnnnnnnnnnnnnnnnnnnnnnnnnnnnnnnnnnnnnnnnnnnnnnnnnnnnnnnnnnnnnnnnnnnnnnnnnnnnnnnnnnnnnnnnnnnnnnnnnnnnnnnnnnnnnnnnnnnnnnnnnnnnnnnnnnnnnnnnnnnnnnnnnnnnnnnnnnnnnnnnnnnnnnnnnnnnnnnnnnnnnnnnnnnnnnnnnnnnnnnnnnnnnnnnnnnnnnnnnnnnnnnnnnnnnnnnnnnnnnnnnnnnnnnnnnnnnnnnnnnnnnnnnnnnnnnnnnnnnnnnnnnnnnnnnnnnnnnnnnnnnnnnnnnnnnnnnnnnnnnnnnnnnnnnnnnnnnnnnnnnnnnnnnnnnnnnnnnnnnnnnnnnnnnnnnnnnnnnnnnnnnnnnnnnnnnnnnnnnnnnnnnnnnnnnnnnnnnnnnnnnnnnnnnnnnnnnnnnnnnnnnnnnnnnnnnnnnnnnnnnnnnnnnnnnnnnnnnnnnnnnnnnnnnnnnnnnnnnnnnnnnnnnnnnnnnnnnnnnnnnnnnnnnnnnnnnnnnnnnnnnnnnnnnnnnnnnnnnnnnnnnnnnnnnnnnnnnnnnnnnnnnnnnnnnnnnnnnnnnnnnnnnnnnnnnnnnnnnnnnnnnnnnnnnnnnnnnnnnnnnnnnnnnnnnnnnnnnnnnnnnnnnnnnnnnnnnnnnnnnnnnnnnnnnnnnnnnnnnnnnnnnnnnnnnnnnnnnnnnnnnnnnnnnnnnnnnnnnnnnnnnnnnnnnnnnnnnnnnnnnnnnnnnnnnnnnnnnnnnnnnnnnnnnnnnnnnnnnnnnnnnnnnnnnnnnnnnnnnnnnnnnnnnnnnnnnnnnnnnnnnnnnnnnnnnnnnnnnnnnnnnnnnnnnnnnnnnnnnnnnnnnnnnnnnnnnnnnnnnnnnnnnnnnnnnnnnnnnnnnnnnnnnnnnnnnnnnnnnnnnnnnnnnnnnnnnnnnnnnnnnnnnnnnnnnnnnnnnnnnnnnnnnnnnnnnnnnnnnnnnnnnnnnnnnnnnnnnnnnnnnnnnnnnnnnnnnnnnnnnnnnnnnnnnnnnnnnnnnnnnnnnnnnnnnnnnnnnnnnnnnnnnnnnnnnnnnnnnnnnnnnnnnnnnnnnnnnnnnnnnnnnnnnnnnnnnnnnnnnnnnnnnnnnnnnnnnnnnnnnnnnnnnnnnnnnnnnnnnnnnnnnnnnnnnnnnnnnnnnnnnnnnnnnnnnnnnnnnnnnnnnnnnnnnnnnnnnnnnnnnnnnnnnnnnnnnnnnnnnnnnnnnnnnnnnnnnnnnnnnnnnnnnnnnnnnnnnnnnnnnnnnnnnnnnnnnnnnnnnnnnnnnnnnnnnnnnnnnnnnnnnnnnnnnnnnnnnnnnnnnnnnnnnnnnnnnnnnnnnnnnnnnnnnnnnnnnnnnnnnnnnnnnnnnnnnnnnnnnnnnnnnnnnnnnnnnnnnnnnnnnnnnnnnnnnnnnnnnnnnnnnnnnnnnnnnnnnnnnnnnnnnnnnnnnnnnnnnnnnnnnnnnnnnnnnnnnnnnnnnnnnnnnnnnnnnnnnnnnnnnnnnnnnnnnnnnnnnnnnnnnnnnnnnnnnnnnnnnnnnnnnnnnnnnnnnnnnnnnnnnnnnnnnnnnnnnnnnnnnnnnnnnnnnnnnnnnnnnnnnnnnnnnnnnnnnnnnnnnnnnnnnnnnnnnnnnnnnnnnnnnnnnnnnnnnnnnnnnnnnnnnnnnnnnnnnnnnnnnnnnnnnnnnnnnnnnnnnnnnnnnnnnnnnnnnnnnnnnnnnnnnnnnnnnnnnnnnnnnnnnnnnnnnnnnnnnnnnnnnnnnnnnnnnnnnnnnnnnnnnnnnnnnnnnnnnnnnnnnnnnnnnnnnnnnnnnnnnnnnnnnnnnnnnnnnnnnnnnnnnnnnnnnnnnnnnnnnnnnnnnnnnnnnnnnnnnnnnnnnnnnnnnnnnnnnnnnnnnnnnnnnnnnnnnnnnnnnnnnnnnnnnnnnnnnnnnnnnnnnnnnnnnnnnnnnnnnnnnnnnnnnnnnnnnnnnnnnnnnnnnnnnnnnnnnnnnnnnnnnnnnnnnnnnnnnnnnnnnnnnnnnnnnnnnnnnnnnnnnnnnnnnnnnnnnnnnnnnnnnnnnnnnnnnnnnnnnnnnnnnnnnnnnnnnnnnnnnnnnnnnnnnnnnnnnnnnnnnnnnnnnnnnnnnnnnnnnnnnnnnnnnnnnnnnnnnnnnnnnnnnnnnnnnnnnnnnnnnnnnnnnnnnnnnnnnnnnnnnnnnnnnnnnnnnnnnnnnnnnnnnnnnnnnnnnnnnnnnnnnnnnnnnnnnnnnnnnnnnnnnnnnnnnnnnnnnnnnnnnnnnnnnnnnnnnnnnnnnnnnnnnnnnnnnnnnnnnnnnnnnnnnnnnnnnnnnnnnnnnnnnnnnnnnnnnnnnnnnnnnnnnnnnnnnnnnnnnnnnnnnnnnnnnnnnnnnnnnnnnnnnnnnnnnnnnnnnnnnnnnnnnnnnnnnnnnnnnnnnnnnnnnnnnnnnnnnnnnnnnnnnnnnnnnnnnnnnnnnnnnnnnnnnnnnnnnnnnnnnnnnnnnnnnnnnnnnnnnnnnnnnnnnnnnnnnnnnnnnnnnnnnnnnnnnnnnnnnnnnnnnnnnnnnnnnnnnnnnnnnnnnnnnnnnnnnnnnnnnnnnnnnnnnnnnnnnnnnnnnnnnnnnnnnnnnnnnnnnnnnnnnnnnnnnnnnnnnnnnnnnnnnnnnnnnnnnnnnnnnnnnnnnnnnnnnnnnnnnnnnnnnnnnnnnnnnnnnnnnnnnnnnnnnnnnnnnnnnnnnnnnnnnnnnnnnnnnnnnnnnnnnnnnnnnnnnnnnnnnnnnnnnnnnnnnnnnnnnnnnnnnnnnnnnnnnnnnnnnnnnnnnnnnnnnnnnnnnnnnnnnnnnnnnnnnnnnnnnnnnnnnnnnnnnnnnnnnnnnnnnnnnnnnnnnnnnnnnnnnnnnnnnnnnnnnnnnnnnnnnnnnnnnnnnnnnnnnnnnnnnnnnnnnnnnnnnnnnnnnnnnnnnnnnnnnnnnnnnnnnnnnnnnnnnnnnnnnnnnnnnnnnnnnnnnnnnnnnnnnnnnnnnnnnnnnnnnnnnnnnnnnnnnnnnnnnnnnnnnnnnnnnnnnnnnnnnnnnnnnnnnnnnnnnnnnnnnnnnnnnnnnnnnnnnnnnnnnnnnnnnnnnnnnnnnnnnnnnnnnnnnnnnnnnnnnnnnnnnnnnnnnnnnnnnnnnnnnnnnnnnnnnnnnnnnnnnnnnnnnnnnnnnnnnnnnnnnnnnnnnnnnnnnnnnnnnnnnnnnnnnnnnnnnnnnnnnnnnnnnnnnnnnnnnnnnnnnnnnnnnnnnnnnnnnnnnnnnnnnnnnnnnnnnnnnnnnnnnnnnnnnnnnnnnnnnnnnnnnnnnnnnnnnnnnnnnnnnnnnnnnnnnnnnnnnnnnnnnnnnnnnnnnnnnnnnnnnnnnnnnnnnnnnnnnnnnnnnnnnnnnnnnnnnnnnnnnnnnnnnnnnnnnnnnnnnnnnnnnnnnnnnnnnnnnnnnnnnnnnnnnnnnnnnnnnnnnnnnnnnnnnnnnnnnnnnnnnnnnnnnnnnnnnnnnnnnnnnnnnnnnnnnnnnnnnnnnnnnnnnnnnnnnnnnnnnnnnnnnnnnnnnnnnnnnnnnnnnnnnnnnnnnnnnnnnnnnnnnnnnnnnnnnnnnnnnnnnnnnnnnnnnnnnnnnnnnnnnnnnnnnnnnnnnnnnnnnnnnnnnnnnnnnnnnnnnnnnnnnnnnnnnnnnnnnnnnnnnnnnnnnnnnnnnnnnnnnnnnnnnnnnnnnnnnnnnnnnnnnnnnnnnnnnnnnnnnnnnnnnnnnnnnnnnnnnnnnnnnnnnnnnnnnnnnnnnnnnnnnnnnnnnnnnnnnnnnnnnnnnnnnnnnnnnnnnnnnnnnnnnnnnnnnnnnnnnnnnnnnnnnnnnnnnnnnnnnnnnnnnnnnnnnnnnnnnnnnnnnnnnnnnnnnnnnnnnnnnnnnnnnnnnnnnnnnnnnnnnnnnnnnnnnnnnnnnnnnnnnnnnnnnnnnnnnnnnnnnnnnnnnnnnnnnnnnnnnnnnnnnnnnnnnnnnnnnnnnnnnnnnnnnnnnnnnnnnnnnnnnnnnnnnnnnnnnnnnnnnnnnnnnnnnnnnnnnnnnnnnnnnnnnnnnnnnnnnnnnnnnnnnnnnnnnnnnnnnnnnnnnnnnnnnnnnnnnnnnnnnnnnnnnnnnnnnnnnnnnnnnnnnnnnnnnnnnnnnnnnnnnnnnnnnnnnnnnnnnnnnnnnnnnnnnnnnnnnnnnnnnnnnnnnnnnnnnnnnnnnnnnnnnnnnnnnnnnnnnnnnnnnnnnnnnnnnnnnnnnnnnnnnnnnnnnnnnnnnnnnnnnnnnnnnnnnnnnnnnnnnnnnnnnnnnnnnnnnnnnnnnnnnnnnnnnnnnnnnnnnnnnnnnnnnnnnnnnnnnnnnnnnnnnnnnnnnnnnnnnnnnnnnnnnnnnnnnnnnnnnnnnnnnnnnnnnnnnnnnnnnnnnnnnnnnnnnnnnnnnnnnnnnnnnnnnnnnnnnnnnnnnnnnnnnnnnnnnnnnnnnnnnnnnnnnnnnnnnnnnnnnnnnnnnnnnnnnnnnnnnnnnnnnnnnnnnnnnnnnnnnnnnnnnnnnnnnnnnnnnnnnnnnnnnnnnnnnnnnnnnnnnnnnnnnnnnnnnnnnnnnnnnnnnnnnnnnnnnnnnnnnnnnnnnnnnnnnnnnnnnnnnnnnnnnnnnnnnnnnnnnnnnnnnnnnnnnnnnnnnnnnnnnnnnnnnnnnnnnnnnnnnnnnnnnnnnnnnnnnnnnnnnnnnnnnnnnnnnnnnnnnnnnnnnnnnnnnnnnnnnnnnnnnnnnnnnnnnnnnnnnnnnnnnnnnnnnnnnnnnnnnnnnnnnnnnnnnnnnnnnnnnnnnnnnnnnnnnnnnnnnnnnnnnnnnnnnnnnnnnnnnnnnnnnnnnnnnnnnnnnnnnnnnnnnnnnnnnnnnnnnnnnnnnnnnnnnnnnnnnnnnnnnnnnnnnnnnnnnnnnnnnnnnnnnnnnnnnnnnnnnnnnnnnnnnnnnnnnnnnnnnnnnnnnnnnnnnnnnnnnnnnnnnnnnnnnnnnnnnnnnnnnnnnnnnnnnnnnnnnnnnnnnnnnnnnnnnnnnnnnnnnnnnnnnnnnnnnnnnnnnnnnnnnnnnnnnnnnnnnnnnnnnnnnnnnnnnnnnnnnnnnnnnnnnnnnnnnnnnnnnnnnnnnnnnnnnnnnnnnnnnnnnnnnnnnnnnnnnnnnnnnnnnnnnnnnnnnnnnnnnnnnnnnnnnnnnnnnnnnnnnnnnnnnnnnnnnnnnnnnnnnnnnnnnnnnnnnnnnnnnnnnnnnnnnnnnnnnnnnnnnnnnnnnnnnnnnnnnnnnnnnnnnnnnnnnnnnnnnnnnnnnnnnnnnnnnnnnnnnnnnnnnnnnnnnnnnnnnnnnnnnnnnnnnnnnnnnnnnnnnnnnnnnnnnnnnnnnnnnnnnnnnnnnnnnnnnnnnnnnnnnnnnnnnnnnnnnnnnnnnnnnnnnnnnnnnnnnnnnnnnnnnnnnnnnnnnnnnnnnnnnnnnnnnnnnnnnnnnnnnnnnnnnnnnnnnnnnnnnnnnnnnnnnnnnnnnnnnnnnnnnnnnnnnnnnnnnnnnnnnnnnnnnnnnnnnnnnnnnnnnnnnnnnnnnnnnnnnnnnnnnnnnnnnnnnnnnnnnnnnnnnnnnnnnnnnnnnnnnnnnnnnnnnnnnnnnnnnnnnnnnnnnnnnnnnnnnnnnnnnnnnnnnnnnnnnnnnnnnnnnnnnnnnnnnnnnnnnnnnnnnnnnnnnnnnnnnnnnnnnnnnnnnnnnnnnnnnnnnnnnnnnnnnnnnnnnnnnnnnnnnnnnnnnnnnnnnnnnnnnnnnnnnnnnnnnnnnnnnnnnnnnnnnnnnnnnnnnnnnnnnnnnnnnnnnnnnnnnnnnnnnnnnnnnnnnnnnnnnnnnnnnnnnnnnnnnnnnnnnnnnnnnnnnnnnnnnnnnnnnnnnnnnnnnnnnnnnnnnnnnnnnnnnnnnnnnnnnnnnnnnnnnnnnnnnnnnnnnnnnnnnnnnnnnnnnnnnnnnnnnnnnnnnnnnnnnnnnnnnnnnnnnnnnnnnnnnnnnnnnnnnnnnnnnnnnnnnnnnnnnnnnnnnnnnnnnnnnnnnnnnnnnnnnnnnnnnnnnnnnnnnnnnnnnnnnnnnnnnnnnnnnnnnnnnnnnnnnnnnnnnnnnnnnnnnnnnnnnnnnnnnnnnnnnnnnnnnnnnnnnnnnnnnnnnnnnnnnnnnnnnnnnnnnnnnnnnnnnnnnnnnnnnnnnnnnnnnnnnnnnnnnnnnnnnnnnnnnnnnnnnnnnnnnnnnnnnnnnnnnnnnnnnnnnnnnnnnnnnnnnnnnnnnnnnnnnnnnnnnnnnnnnnnnnnnnnnnnnnnnnnnnnnnnnnnnnnnnnnnnnnnnnnnnnnnnnnnnnnnnnnnnnnnnnnnnnnnnnnnnnnnnnnnnnnnnnnnnnnnnnnnnnnnnnnnnnnnnnnnnnnnnnnnnnnnnnnnnnnnnnnnnnnnnnnnnnnnnnnnnnnnnnnnnnnnnnnnnnnnnnnnnnnnnnnnnnnnnnnnnnnnnnnnnnnnnnnnnnnnnnnnnnnnnnnnnnnnnnnnnnnnnnnnnnnnnnnnnnnnnnnnnnnnnnnnnnnnnnnnnnnnnnnnnnnnnnnnnnnnnnnnnnnnnnnnnnnnnnnnnnnnnnnnnnnnnnnnnnnnnnnnnnnnnnnnnnnnnnnnnnnnnnnnnnnnnnnnnnnnnnnnnnnnnnnnnnnnnnnnnnnnnnnnnnnnnnnnnnnnnnnnnnnnnnnnnnnnnnnnnnnnnnnnnnnnnnnnnnnnnnnnnnnnnnnnnnnnnnnnnnnnnnnnnnnnnnnnnnnnnnnnnnnnnnnnnnnnnnnnnnnnnnnnnnnnnnnnnnnnnnnnnnnnnnnnnnnnnnnnnnnnnnnnnnnnnnnnnnnnnnnnnnnnnnnnnnnnnnnnnnnnnnnnnnnnnnnnnnnnnnnnnnnnnnnnnnnnnnnnnnnnnnnnnnnnnnnnnnnnnnnnnnnnnnnnnnnnnnnnnnnnnnnnnnnnnnnnnnnnnnnnnnnnnnnnnnnnnnnnnnnnnnnnnnnnnnnnnnnnnnnnnnnnnnnnnnnnnnnnnnnnnnnnnnnnnnnnnnnnnnnnnnnnnnnnnnnnnnnnnnnnnnnnnnnnnnnnnnnnnnnnnnnnnnnnnnnnnnnnnnnnnnnnnnnnnnnnnnnnnnnnnnnnnnnnnnnnnnnnnnnnnnnnnnnnnnnnnnnnnnnnnnnnnnnnnnnnnnnnnnnnnnnnnnnnnnnnnnnnnnnnnnnnnnnnnnnnnnnnnnnnnnnnnnnnnnnnnnnnnnnnnnnnnnnnnnnnnnnnnnnnnnnnnnnnnnnnnnnnnnnnnnnnnnnnnnnnnnnnnnnnnnnnnnnnnnnnnnnnnnnnnnnnnnnnnnnnnnnnnnnnnnnnnnnnnnnnnnnnnnnnnnnnnnnnnnnnnnnnnnnnnnnnnnnnnnnnnnnnnnnnnnnnnnnnnnnnnnnnnnnnnnnnnnnnnnnnnnnnnnnnnnnnnnnnnnnnnnnnnnnnnnnnnnnnnnnnnnnnnnnnnnnnnnnnnnnnnnnnnnnnnnnnnnnnnnnnnnnnnnnnnnnnnnnnnnnnnnnnnnnnnnnnnnnnnnnnnnnnnnnnnnnnnnnnnnnnnnnnnnnnnnnnnnnnnnnnnnnnnnnnnnnnnnnnnnnnnnnnnnnnnnnnnnnnnnnnnnnnnnnnnnnnnnnnnnnnnnnnnnnnnnnnnnnnnnnnnnnnnnnnnnnnnnnnnnnnnnnnnnnnnnnnnnnnnnnnnnnnnnnnnnnnnnnnnnnnnnnnnnnnnnnnnnnnnnnnnnnnnnnnnnnnnnnnnnnnnnnnnnnnnnnnnnnnnnnnnnnnnnnnnnnnnnnnnnnnnnnnnnnnnnnnnnnnnnnnnnnnnnnnnnnnnnnnnnnnnnnnnnnnnnnnnnnnnnnnnnnnnnnnnnnnnnnnnnnnnnnnnnnnnnnnnnnnnnnnnnnnnnnnnnnnnnnnnnnnnnnnnnnnnnnnnnnnnnnnnnnnnnnnnnnnnnnnnnnnnnnnnnnnnnnnnnnnnnnnnnnnnnnnnnnnnnnnnnnnnnnnnnnnnnnnnnnnnnnnnnnnnnnnnnnnnnnnnnnnnnnnnnnnnnnnnnnnnnnnnnnnnnnnnnnnnnnnnnnnnnnnnnnnnnnnnnnnnnnnnnnnnnnnnnnnnnnnnnnnnnnnnnnnnnnnnnnnnnnnnnnnnnnnnnnnnnnnnnnnnnnnnnnnnnnnnnnnnnnnnnnnnnnnnnnnnnnnnnnnnnnnnnnnnnnnnnnnnnnnnnnnnnnnnnnnnnnnnnnnnnnnnnnnnnnnnnnnnnnnnnnnnnnnnnnnnnnnnnnnnnnnnnnnnnnnnnnnnnnnnnnnnnnnnnnnnnnnnnnnnnnnnnnnnnnnnnnnnnnnnnnnnnnnnnnnnnnnnnnnnnnnnnnnnnnnnnnnnnnnnnnnnnnnnnnnnnnnnnnnnnnnnnnnnnnnnnnnnnnnnnnnnnnnnnnnnnnnnnnnnnnnnnnnnnnnnnnnnnnnnnnnnnnnnnnnnnnnnnnnnnnnnnnnnnnnnnnnnnnnnnnnnnnnnnnnnnnnnnnnnnnnnnnnnnnnnnnnnnnnnnnnnnnnnnnnnnnnnnnnnnnnnnnnnnnnnnnnnnnnnnnnnnnnnnnnnnnnnnnnnnnnnnnnnnnnnnnnnnnnnnnnnnnnnnnnnnnnnnnnnnnnnnnnnnnnnnnnnnnnnnnnnnnnnnnnnnnnnnnnnnnnnnnnnnnnnnnnnnnnnnnnnnnnnnnnnnnnnnnnnnnnnnnnnnnnnnnnnnnnnnnnnnnnnnnnnnnnnnnnnnnnnnnnnnnnnnnnnnnnnnnnnnnnnnnnnnnnnnnnnnnnnnnnnnnnnnnnnnnnnnnnnnnnnnnnnnnnnnnnnnnnnnnnnnnnnnnnnnnnnnnnnnnnnnnnnnnnnnnnnnnnnnnnnnnnnnnnnnnnnnnnnnnnnnnnnnnnnnnnnnnnnnnnnnnnnnnnnnnnnnnnnnnnnnnnnnnnnnnnnnnnnnnnnnnnnnnnnnnnnnnnnnnnnnnnnnnnnnnnnnnnnnnnnnnnnnnnnnnnnnnnnnnnnnnnnnnnnnnnnnnnnnnnnnnnnnnnnnnnnnnnnnnnnnnnnnnnnnnnnnnnnnnnnnnnnnnnnnnnnnnnnnnnnnnnnnnnnnnnnnnnnnnnnnnnnnnnnnnnnnnnnnnnnnnnnnnnnnnnnnnnnnnnnnnnnnnnnnnnnnnnnnnnnnnnnnnnnnnnnnnnnnnnnnnnnnnnnnnnnnnnnnnnnnnnnnnnnnnnnnnnnnnnnnnnnnnnnnnnnnnnnnnnnnnnnnnnnnnnnnnnnnnnnnnnnnnnnnnnnnnnnnnnnnnnnnnnnnnnnnnnnnnnnnnnnnnnnnnnnnnnnnnnnnnnnnnnnnnnnnnnnnnnnnnnnnnnnnnnnnnnnnnnnnnnnnnnnnnnnnnnnnnnnnnnnnnnnnnnnnnnnnnnnnnnnnnnnnnnnnnnnnnnnnnnnnnnnnnnnnnnnnnnnnnnnnnnnnnnnnnnnnnnnnnnnnnnnnnnnnnnnnnnnnnnnnnnnnnnnnnnnnnnnnnnnnnnnnnnnnnnnnnnnnnnnnnnnnnnnnnnnnnnnnnnnnnnnnnnnnnnnnnnnnnnnnnnnnnnnnnnnnnnnnnnnnnnnnnnnnnnnnnnnnnnnnnnnnnnnnnnnnnnnnnnnnnnnnnnnnnnnnnnnnnnnnnnnnnnnnnnnnnnnnnnnnnnnnnnnnnnnnnnnnnnnnnnnnnnnnnnnnnnnnnnnnnnnnnnnnnnnnnnnnnnnnnnnnnnnnnnnnnnnnnnnnnnnnnnnnnnnnnnnnnnnnnnnnnnnnnnnnnnnnnnnnnnnnnnnnnnnnnnnnnnnnnnnnnnnnnnnnnnnnnnnnnnnnnnnnnnnnnnnnnnnnnnnnnnnnnnnnnnnnnnnnnnnnnnnnnnnnnnnnnnnnnnnnnnnnnnnnnnnnnnnnnnnnnnnnnnnnnnnnnnnnnnnnnnnnnnnnnnnnnnnnnnnnnnnnnnnnnnnnnnnnnnnnnnnnnnnnnnnnnnnnnnnnnnnnnnnnnnnnnnnnnnnnnnnnnnnnnnnnnnnnnnnnnnnnnnnnnnnnnnnnnnnnnnnnnnnnnnnnnnnnnnnnnnnnnnnnnnnnnnnnnnnnnnnnnnnnnnnnnnnnnnnnnnnnnnnnnnnnnnnnnnnnnnnnnnnnnnnnnnnnnnnnnnnnnnnnnnnnnnnnnnnnnnnnnnnnnnnnnnnnnnnnnnnnnnnnnnnnnnnnnnnnnnnnnnnnnnnnnnnnnnnnnnnnnnnnnnnnnnnnnnnnnnnnnnnnnnnnnnnnnnnnnnnnnnnnnnnnnnnnnnnnnnnnnnnnnnnnnnnnnnnnnnnnnnnnnnnnnnnnnnnnnnnnnnnnnnnnnnnnnnnnnnnnnnnnnnnnnnnnnnnnnnnnnnnnnnnnnnnnnnnnnnnnnnnnnnnnnnnnnnnnnnnnnnnnnnnnnnnnnnnnnnnnnnnnnnnnnnnnnnnnnnnnnnnnnnnnnnnnnnnnnnnnnnnnnnnnnnnnnnnnnnnnnnnnnnnnnnnnnnnnnnnnnnnnnnnnnnnnnnnnnnnnnnnnnnnnnnnnnnnnnnnnnnnnnnnnnnnnnnnnnnnnnnnnnnnnnnnnnnnnnnnnnnnnnnnnnnnnnnnnnnnnnnnnnnnnnnnnnnnnnnnnnnnnnnnnnnnnnnnnnnnnnnnnnnnnnnnnnnnnnnnnnnnnnnnnnnnnnnnnnnnnnnnnnnnnnnnnnnnnnnnnnnnnnnnnnnnnnnnnnnnnnnnnnnnnnnnnnnnnnnnnnnnnnnnnnnnnnnnnnnnnnnnnnnnnnnnnnnnnnnnnnnnnnnnnnnnnnnnnnnnnnnnnnnnnnnnnnnnnnnnnnnnnnnnnnnnnnnnnnnnnnnnnnnnnnnnnnnnnnnnnnnnnnnnnnnnnnnnnnnnnnnnnnnnnnnnnnnnnnnnnnnnnnnnnnnnnnnnnnnnnnnnnnnnnnnnnnnnnnnnnnnnnnnnnnnnnnnnnnnnnnnnnnnnnnnnnnnnnnnnnnnnnnnnnnnnnnnnnnnnnnnnnnnnnnnnnnnnnnnnnnnnnnnnnnnnnnnnnnnnnnnnnnnnnnnnnnnnnnnnnnnnnnnnnnnnnnnnnnnnnnnnnnnnnnnnnnnnnnnnnnnnnnnnnnnnnnnnnnnnnnnnnnnnnnnnnnnnnnnnnnnnnnnnnnnnnnnnnnnnnnnnnnnnnnnnnnnnnnnnnnnnnnnnnnnnnnnnnnnnnnnnnnnnnnnnnnnnnnnnnnnnnnnnnnnnnnnnnnnnnnnnnnnnnnnnnnnnnnnnnnnnnnnnnnnnnnnnnnnnnnnnnnnnnnnnnnnnnnnnnnnnnnnnnnnnnnnnnnnnnnnnnnnnnnnnnnnnnnnnnnnnnnnnnnnnnnnnnnnnnnnnnnnnnnnnnnnnnnnnnnnnnnnnnnnnnnnnnnnnnnnnnnnnnnnnnnnnnnnnnnnnnnnnnnnnnnnnnnnnnnnnnnnnnnnnnnnnnnnnnnnnnnnnnnnnnnnnnnnnnnnnnnnnnnnnnnnnnnnnnnnnnnnnnnnnnnnnnnnnnnnnnnnnnnnnnnnnnnnnnnnnnnnnnnnnnnnnnnnnnnnnnnnnnnnnnnnnnnnnnnnnnnnnnnnnnnnnnnnnnnnnnnnnnnnnnnnnnnnnnnnnnnnnnnnnnnnnnnnnnnnnnnnnnnnnnnnnnnnnnnnnnnnnnnnnnnnnnnnnnnnnnnnnnnnnnnnnnnnnnnnnnnnnnnnnnnnnnnnnnnnnnnnnnnnnnnnnnnnnnnnnnnnnnnnnnnnnnnnnnnnnnnnnnnnnnnnnnnnnnnnnnnnnnnnnnnnnnnnnnnnnnnnnnnnnnnnnnnnnnnnnnnnnnnnnnnnnnnnnnnnnnnnnnnnnnnnnnnnnnnnnnnnnnnnnnnnnnnnnnnnnnnnnnnnnnnnnnnnnnnnnnnnnnnnnnnnnnnnnnnnnnnnnnnnnnnnnnnnnnnnnnnnnnnnnnnnnnnnnnnnnnnnnnnnnnnnnnnnnnnnnnnnnnnnnnnnnnnnnnnnnnnnnnnnnnnnnnnnnnnnnnnnnnnnnnnnnnnnnnnnnnnnnnnnnnnnnnnnnnnnnnnnnnnnnnnnnnnnnnnnnnnnnnnnnnnnnnnnnnnnnnnnnnnnnnnnnnnnnnnnnnnnnnnnnnnnnnnnnnnnnnnnnnnnnnnnnnnnnnnnnnnnnnnnnnnnnnnnnnnnnnnnnnnnnnnnnnnnnnnnnnnnnnnnnnnnnnnnnnnnnnnnnnnnnnnnnnnnnnnnnnnnnnnnnnnnnnnnnnnnnnnnnnnnnnnnnnnnnnnnnnnnnnnnnnnnnnnnnnnnnnnnnnnnnnnnnnnnnnnnnnnnnnnnnnnnnnnnnnnnnnnnnnnnnnnnnnnnnnnnnnnnnnnnnnnnnnnnnnnnnnnnnnnnnnnnnnnnnnnnnnnnnnnnnnnnnnnnnnnnnnnnnnnnnnnnnnnnnnnnnnnnnnnnnnnnnnnnnnnnnnnnnnnnnnnnnnnnnnnnnnnnnnnnnnnnnnnnnnnnnnnnnnnnnnnnnnnnnnnnnnnnnnnnnnnnnnnnnnnnnnnnnnnnnnnnnnnnnnnnnnnnnnnnnnnnnnnnnnnnnnnnnnnnnnnnnnnnnnnnnnnnnnnnnnnnnnnnnnnnnnnnnnnnnnnnnnnnnnnnnnnnnnnnnnnnnnnnnnnnnnnnnnnnnnnnnnnnnnnnnnnnnnnnnnnnnnnnnnnnnnnnnnnnnnnnnnnnnnnnnnnnnnnnnnnnnnnnnnnnnnnnnnnnnnnnnnnnnnnnnnnnnnnnnnnnnnnnnnnnnnnnnnnnnnnnnnnnnnnnnnnnnnnnnnnnnnnnnnnnnnnnnnnnnnnnnnnnnnnnnnnnnnnnnnnnnnnnnnnnnnnnnnnnnnnnnnnnnnnnnnnnnnnnnnnnnnnnnnnnnnnnnnnnnnnnnnnnnnnnnnnnnnnnnnnnnnnnnnnnnnnnnnnnnnnnnnnnnnnnnnnnnnnnnnnnnnnnnnnnnnnnnnnnnnnnnnnnnnnnnnnnnnnnnnnnnnnnnnnnnnnnnnnnnnnnnnnnnnnnnnnnnnnnnnnnnnnnnnnnnnnnnnnnnnnnnnnnnnnnnnnnnnnnnnnnnnnnnnnnnnnnnnnnnnnnnnnnnnnnnnnnnnnnnnnnnnnnnnnnnnnnnnnnnnnnnnnnnnnnnnnnnnnnnnnnnnnnnnnnnnnnnnnnnnnnnnnnnnnnnnnnnnnnnnnnnnnnnnnnnnnnnnnnnnnnnnnnnnnnnnnnnnnnnnnnnnnnnnnnnnnnnnnnnnnnnnnnnnnnnnnnnnnnnnnnnnnnnnnnnnnnnnnnnnnnnnnnnnnnnnnnnnnnnnnnnnnnnnnnnnnnnnnnnnnnnnnnnnnnnnnnnnnnnnnnnnnnnnnnnnnnnnnnnnnnnnnnnnnnnnnnnnnnnnnnnnnnnnnnnnnnnnnnnnnnnnnnnnnnnnnnnnnnnnnnnnnnnnnnnnnnnnnnnnnnnnnnnnnnnnnnnnnnnnnnnnnnnnnnnnnnnnnnnnnnnnnnnnnnnnnnnnnnnnnnnnnnnnnnnnnnnnnnnnnnnnnnnnnnnnnnnnnnnnnnnnnnnnnnnnnnnnnnnnnnnnnnnnnnnnnnnnnnnnnnnnnnnnnnnnnnnnnnnnnnnnnnnnnnnnnnnnnnnnnnnnnnnnnnnnnnnnnnnnnnnnnnnnnnnnnnnnnnnnnnnnnnnnnnnnnnnnnnnnnnnnnnnnnnnnnnnnnnnnnnnnnnnnnnnnnnnnnnnnnnnnnnnnnnnnnnnnnnnnnnnnnnnnnnnnnnnnnnnnnnnnnnnnnnnnnnnnnnnnnnnnnnnnnnnnnnnnnnnnnnnnnnnnnnnnnnnnnnnnnnnnnnnnnnnnnnnnnnnnnnnnnnnnnnnnnnnnnnnnnnnnnnnnnnnnnnnnnnnnnnnnnnnnnnnnnnnnnnnnnnnnnnnnnnnnnnnnnnnnnnnnnnnnnnnnnnnnnnnnnnnnnnnnnnnnnnnnnnnnnnnnnnnnnnnnnnnnnnnnnnnnnnnnnnnnnnnnnnnnnnnnnnnnnnnnnnnnnnnnnnnnnnnnnnnnnnnnnnnnnnnnnnnnnnnnnnnnnnnnnnnnnnnnnnnnnnnnnnnnnnnnnnnnnnnnnnnnnnnnnnnnnnnnnnnnnnnnnnnnnnnnnnnnnnnnnnnnnnnnnnnnnnnnnnnnnnnnnnnnnnnnnnnnnnnnnnnnnnnnnnnnnnnnnnnnnnnnnnnnnnnnnnnnnnnnnnnnnnnnnnnnnnnnnnnnnnnnnnnnnnnnnnnnnnnnnnnnnnnnnnnnnnnnnnnnnnnnnnnnnnnnnnnnnnnnnnnnnnnnnnnnnnnnnnnnnnnnnnnnnnnnnnnnnnnnnnnnnnnnnnnnnnnnnnnnnnnnnnnnnnnnnnnnnnnnnnnnnnnnnnnnnnnnnnnnnnnnnnnnnnnnnnnnnnnnnnnnnnnnnnnnnnnnnnnnnnnnnnnnnnnnnnnnnnnnnnnnnnnnnnnnnnnnnnnnnnnnnnnnnnnnnnnnnnnnnnnnnnnnnnnnnnnnnnnnnnnnnnnnnnnnnnnnnnnnnnnnnnnnnnnnnnnnnnnnnnnnnnnnnnnnnnnnnnnnnnnnnnnnnnnnnnnnnnnnnnnnnnnnnnnnnnnnnnnnnnnnnnnnnnnnnnnnnnnnnnnnnnnnnnnnnnnnnnnnnnnnnnnnnnnnnnnnnnnnnnnnnnnnnnnnnnnnnnnnnnnnnnnnnnnnnnnnnnnnnnnnnnnnnnnnnnnnnnnnnnnnnnnnnnnnnnnnnnnnnnnnnnnnnnnnnnnnnnnnnnnnnnnnnnnnnnnnnnnnnnnnnnnnnnnnnnnnnnnnnnnnnnnnnnnnnnnnnnnnnnnnnnnnnnnnnnnnnnnnnnnnnnnnnnnnnnnnnnnnnnnnnnnnnnnnnnnnnnnnnnnnnnnnnnnnnnnnnnnnnnnnnnnnnnnnnnnnnnnnnnnnnnnnnnnnnnnnnnnnnnnnnnnnnnnnnnnnnnnnnnnnnnnnnnnnnnnnnnnnnnnnnnnnnnnnnnnnnnnnnnnnnnnnnnnnnnnnnnnnnnnnnnnnnnnnnnnnnnnnnnnnnnnnnnnnnnnnnnnnnnnnnnnnnnnnnnnnnnnnnnnnnnnnnnnnnnnnnnnnnnnnnnnnnnnnnnnnnnnnnnnnnnnnnnnnnnnnnnnnnnnnnnnnnnnnnnnnnnnnnnnnnnnnnnnnnnnnnnnnnnnnnnnnnnnnnnnnnnnnnnnnnnnnnnnnnnnnnnnnnnnnnnnnnnnnnnnnnnnnnnnnnnnnnnnnnnnnnnnnnnnnnnnnnnnnnnnnnnnnnnnnnnnnnnnnnnnnnnnnnnnnnnnnnnnnnnnnnnnnnnnnnnnnnnnnnnnnnnnnnnnnnnnnnnnnnnnnnnnnnnnnnnnnnnnnnnnnnnnnnnnnnnnnnnnnnnnnnnnnnnnnnnnnnnnnnnnnnnnnnnnnnnnnnnnnnnnnnnnnnnnnnnnnnnnnnnnnnnnnnnnnnnnnnnnnnnnnnnnnnnnnnnnnnnnnnnnnnnnnnnnnnnnnnnnnnnnnnnnnnnnnnnnnnnnnnnnnnnnnnnnnnnnnnnnnnnnnnnnnnnnnnnnnnnnnnnnnnnnnnnnnnnnnnnnnnnnnnnnnnnnnnnnnnnnnnnnnnnnnnnnnnnnnnnnnnnnnnnnnnnnnnnnnnnnnnnnnnnnnnnnnnnnnnnnnnnnnnnnnnnnnnnnnnnnnnnnnnnnnnnnnnnnnnnnnnnnnnnnnnnnnnnnnnnnnnnnnnnnnnnnnnnnnnnnnnnnnnnnnnnnnnnnnnnnnnnnnnnnnnnnnnnnnnnnnnnnnnnnnnnnnnnnnnnnnnnnnnnnnnnnnnnnnnnnnnnnnnnnnnnnnnnnnnnnnnnnnnnnnnnnnnnnnnnnnnnnnnnnnnnnnnnnnnnnnnnnnnnnnnnnnnnnnnnnnnnnnnnnnnnnnnnnnnnnnnnnnnnnnnnnnnnnnnnnnnnnnnnnnnnnnnnnnnnnnnnnnnnnnnnnnnnnnnnnnnnnnnnnnnnnnnnnnnnnnnnnnnnnnnnnnnnnnnnnnnnnnnnnnnnnnnnnnnnnnnnnnnnnnnnnnnnnnnnnnnnnnnnnnnnnnnnnnnnnnnnnnnnnnnnnnnnnnnnnnnnnnnnnnnnnnnnnnnnnnnnnnnnnnnnnnnnnnnnnnnnnnnnnnnnnnnnnnnnnnnnnnnnnnnnnnnnnnnnnnnnnnnnnnnnnnnnnnnnnnnnnnnnnnnnnnnnnnnnnnnnnnnnnnnnnnnnnnnnnnnnnnnnnnnnnnnnnnnnnnnnnnnnnnnnnnnnnnnnnnnnnnnnnnnnnnnnnnnnnnnnnnnnnnnnnnnnnnnnnnnnnnnnnnnnnnnnnnnnnnnnnnnnnnnnnnnnnnnnnnnnnnnnnnnnnnnnnnnnnnnnnnnnnnnnnnnnnnnnnnnnnnnnnnnnnnnnnnnnnnnnnnnnnnnnnnnnnnnnnnnnnnnnnnnnnnnnnnnnnnnnnnnnnnnnnnnnnnnnnnnnnnnnnnnnnnnnnnnnnnnnnnnnnnnnnnnnnnnnnnnnnnnnnnnnnnnnnnnnnnnnnnnnnnnnnnnnnnnnnnnnnnnnnnnnnnnnnnnnnnnnnnnnnnnnnnnnnnnnnnnnnnnnnnnnnnnnnnnnnnnnnnnnnnnnnnnnnnnnnnnnnnnnnnnnnnnnnnnnnnnnnnnnnnnnnnnnnnnnnnnnnnnnnnnnnnnnnnnnnnnnnnnnnnnnnnnnnnnnnnnnnnnnnnnnnnnnnnnnnnnnnnnnnnnnnnnnnnnnnnnnnnnnnnnnnnnnnnnnnnnnnnnnnnnnnnnnnnnnnnnnnnnnnnnnnnnnnnnnnnnnnnnnnnnnnnnnnnnnnnnnnnnnnnnnnnnnnnnnnnnnnnnnnnnnnnnnnnnnnnnnnnnnnnnnnnnnnnnnnnnnnnnnnnnnnnnnnnnnnnnnnnnnnnnnnnnnnnnnnnnnnnnnnnnnnnnnnnnnnnnnnnnnnnnnnnnnnnnnnnnnnnnnnnnnnnnnnnnnnnnnnnnnnnnnnnnnnnnnnnnnnnnnnnnnnnnnnnnnnnnnnnnnnnnnnnnnnnnnnnnnnnnnnnnnnnnnnnnnnnnnnnnnnnnnnnnnnnnnnnnnnnnnnnnnnnnnnnnnnnnnnnnnnnnnnnnnnnnnnnnnnnnnnnnnnnnnnnnnnnnnnnnnnnnnnnnnnnnnnnnnnnnnnnnnnnnnnnnnnnnnnnnnnnnnnnnnnnnnnnnnnnnnnnnnnnnnnnnnnnnnnnnnnnnnnnnnnnnnnnnnnnnnnnnnnnnnnnnnnnnnnnnnnnnnnnnnnnnnnnnnnnnnnnnnnnnnnnnnnnnnnnnnnnnnnnnnnnnnnnnnnnnnnnnnnnnnnnnnnnnnnnnnnnnnnnnnnnnnnnnnnnnnnnnnnnnnnnnnnnnnnnnnnnnnnnnnnnnnnnnnnnnnnnnnnnnnnnnnnnnnnnnnnnnnnnnnnnnnnnnnnnnnnnnnnnnnnnnnnnnnnnnnnnnnnnnnnnnnnnnnnnnnnnnnnnnnnnnnnnnnnnnnnnnnnnnnnnnnnnnnnnnnnnnnnnnnnnnnnnnnnnnnnnnnnnnnnnnnnnnnnnnnnnnnnnnnnnnnnnnnnnnnnnnnnnnnnnnnnnnnnnnnnnnnnnnnnnnnnnnnnnnnnnnnnnnnnnnnnnnnnnnnnnnnnnnnnnnnnnnnnnnnnnnnnnnnnnnnnnnnnnnnnnnnnnnnnnnnnnnnnnnnnnnnnnnnnnnnnnnnnnnnnnnnnnnnnnnnnnnnnnnnnnnnnnnnnnnnnnnnnnnnnnnnnnnnnnnnnnnnnnnnnnnnnnnnnnnnnnnnnnnnnnnnnnnnnnnnnnnnnnnnnnnnnnnnnnnnnnnnnnnnnnnnnnnnnnnnnnnnnnnnnnnnnnnnnnnnnnnnnnnnnnnnnnnnnnnnnnnnnnnnnnnnnnnnnnnnnnnnnnnnnnnnnnnnnnnnnnnnnnnnnnnnnnnnnnnnnnnnnnnnnnnnnnnnnnnnnnnnnnnnnnnnnnnnnnnnnnnnnnnnnnnnnnnnnnnnnnnnnnnnnnnnnnnnnnnnnnnnnnnnnnnnnnnnnnnnnnnnnnnnnnnnnnnnnnnnnnnnnnnnnnnnnnnnnnnnnnnnnnnnnnnnnnnnnnnnnnnnnnnnnnnnnnnnnnnnnnnnnnnnnnnnnnnnnnnnnnnnnnnnnnnnnnnnnnnnnnnnnnnnnnnnnnnnnnnnnnnnnnnnnnnnnnnnnnnnnnnnnnnnnnnnnnnnnnnnnnnnnnnnnnnnnnnnnnnnnnnnnnnnnnnnnnnnnnnnnnnnnnnnnnnnnnnnnnnnnnnnnnnnnnnnnnnnnnnnnnnnnnnnnnnnnnnnnnnnnnnnnnnnnnnnnnnnnnnnnnnnnnnnnnnnnnnnnnnnnnnnnnnnnnnnnnnnnnnnnnnnnnnnnnnnnnnnnnnnnnnnnnnnnnnnnnnnnnnnnnnnnnnnnnnnnnnnnnnnnnnnnnnnnnnnnnnnnnnnnnnnnnnnnnnnnnnnnnnnnnnnnnnnnnnnnnnnnnnnnnnnnnnnnnnnnnnnnnnnnnnnnnnnnnnnnnnnnnnnnnnnnnnnnnnnnnnnnnnnnnnnnnnnnnnnnnnnnnnnnnnnnnnnnnnnnnnnnnnnnnnnnnnnnnnnnnnnnnnnnnnnnnnnnnnnnnnnnnnnnnnnnnnnnnnnnnnnnnnnnnnnnnnnnnnnnnnnnnnnnnnnnnnnnnnnnnnnnnnnnnnnnnnnnnnnnnnnnnnnnnnnnnnnnnnnnnnnnnnnnnnnnnnnnnnnnnnnnnnnnnnnnnnnnnnnnnnnnnnnnnnnnnnnnnnnnnnnnnnnnnnnnnnnnnnnnnnnnnnnnnnnnnnnnnnnnnnnnnnnnnnnnnnnnnnnnnnnnnnnnnnnnnnnnnnnnnnnnnnnnnnnnnnnnnnnnnnnnnnnnnnnnnnnnnnnnnnnnnnnnnnnnnnnnnnnnnnnnnnnnnnnnnnnnnnnnnnnnnnnnnnnnnnnnnnnnnnnnnnnnnnnnnnnnnnnnnnnnnnnnnnnnnnnnnnnnnnnnnnnnnnnnnnnnnnnnnnnnnnnnnnnnnnnnnnnnnnnnnnnnnnnnnnnnnnnnnnnnnnnnnnnnnnnnnnnnnnnnnnnnnnnnnnnnnnnnnnnnnnnnnnnnnnnnnnnnnnnnnnnnnnnnnnnnnnnnnnnnnnnnnnnnnnnnnnnnnnnnnnnnnnnnnnnnnnnnnnnnnnnnnnnnnnnnnnnnnnnnnnnnnnnnnnnnnnnnnnnnnnnnnnnnnnnnnnnnnnnnnnnnnnnnnnnnnnnnnnnnnnnnnnnnnnnnnnnnnnnnnnnnnnnnnnnnnnnnnnnnnnnnnnnnnnnnnnnnnnnnnnnnnnnnnnnnnnnnnnnnnnnnnnnnnnnnnnnnnnnnnnnnnnnnnnnnnnnnnnnnnnnnnnnnnnnnnnnnnnnnnnnnnnnnnnnnnnnnnnnnnnnnnnnnnnnnnnnnnnnnnnnnnnnnnnnnnnnnnnnnnnnnnnnnnnnnnnnnnnnnnnnnnnnnnnnnnnnnnnnnnnnnnnnnnnnnnnnnnnnnnnnnnnnnnnnnnnnnnnnnnnnnnnnnnnnnnnnnnnnnnnnnnnnnnnnnnnnnnnnnnnnnnnnnnnnnnnnnnnnnnnnnnnnnnnnnnnnnnnnnnnnnnnnnnnnnnnnnnnnnnnnnnnnnnnnnnnnnnnnnnnnnnnnnnnnnnnnnnnnnnnnnnnnnnnnnnnnnnnnnnnnnnnnnnnnnnnnnnnnnnnnnnnnnnnnnnnnnnnnnnnnnnnnnnnnnnnnnnnnnnnnnnnnnnnnnnnnnnnnnnnnnnnnnnnnnnnnnnnnnnnnnnnnnnnnnnnnnnnnnnnnnnnnnnnnnnnnnnnnnnnnnnnnnnnnnnnnnnnnnnnnnnnnnnnnnnnnnnnnnnnnnnnnnnnnnnnnnnnnnnnnnnnnnnnnnnnnnnnnnnnnnnnnnnnnnnnnnnnnnnnnnnnnnnnnnnnnnnnnnnnnnnnnnnnnnnnnnnnnnnnnnnnnnnnnnnnnnnnnnnnnnnnnnnnnnnnnnnnnnnnnnnnnnnnnnnnnnnnnnnnnnnnnnnnnnnnnnnnnnnnnnnnnnnnnnnnnnnnnnnnnnnnnnnnnnnnnnnnnnnnnnnnnnnnnnnnnnnnnnnnnnnnnnnnnnnnnnnnnnnnnnnnnnnnnnnnnnnnnnnnnnnnnnnnnnnnnnnnnnnnnnnnnnnnnnnnnnnnnnnnnnnnnnnnnnnnnnnnnnnnnnnnnnnnnnnnnnnnnnnnnnnnnnnnnnnnnnnnnnnnnnnnnnnnnnnnnnnnnnnnnnnnnnnnnnnnnnnnnnnnnnnnnnnnnnnnnnnnnnnnnnnnnnnnnnnnnnnnnnnnnnnnnnnnnnnnnnnnnnnnnnnnnnnnnnnnnnnnnnnnnnnnnnnnnnnnnnnnnnnnnnnnnnnnnnnnnnnnnnnnnnnnnnnnnnnnnnnnnnnnnnnnnnnnnnnnnnnnnnnnnnnnnnnnnnnnnnnnnnnnnnnnnnnnnnnnnnnnnnnnnnnnnnnnnnnnnnnnnnnnnnnnnnnnnnnnnnnnnnnnnnnnnnnnnnnnnnnnnnnnnnnnnnnnnnnnnnnnnnnnnnnnnnnnnnnnnnnnnnnnnnnnnnnnnnnnnnnnnnnnnnnnnnnnnnnnnnnnnnnnnnnnnnnnnnnnnnnnnnnnnnnnnnnnnnnnnnnnnnnnnnnnnnnnnnnnnnnnnnnnnnnnnnnnnnnnnnnnnnnnnnnnnnnnnnnnnnnnnnnnnnnnnnnnnnnnnnnnnnnnnnnnnnnnnnnnnnnnnnnnnnnnnnnnnnnnnnnnnnnnnnnnnnnnnnnnnnnnnnnnnnnnnnnnnnnnnnnnnnnnnnnnnnnnnnnnnnnnnnnnnnnnnnnnnnnnnnnnnnnnnnnnnnnnnnnnnnnnnnnnnnnnnnnnnnnnnnnnnnnnnnnnnnnnnnnnnnnnnnnnnnnnnnnnnnnnnnnnnnnnnnnnnnnnnnnnnnnnnnnnnnnnnnnnnnnnnnnnnnnnnnnnnnnnnnnnnnnnnnnnnnnnnnnnnnnnnnnnnnnnnnnnnnnnnnnnnnnnnnnnnnnnnnnnnnnnnnnnnnnnnnnnnnnnnnnnnnnnnnnnnnnnnnnnnnnnnnnnnnnnnnnnnnnnnnnnnnnnnnnnnnnnnnnnnnnnnnnnnnnnnnnnnnnnnnnnnnnnnnnnnnnnnnnnnnnnnnnnnnnnnnnnnnnnnnnnnnnnnnnnnnnnnnnnnnnnnnnnnnnnnnnnnnnnnnnnnnnnnnnnnnnnnnnnnnnnnnnnnnnnnnnnnnnnnnnnnnnnnnnnnnnnnnnnnnnnnnnnnnnnnnnnnnnnnnnnnnnnnnnnnnnnnnnnnnnnnnnnnnnnnnnnnnnnnnnnnnnnnnnnnnnnnnnnnnnnnnnnnnnnnnnnnnnnnnnnnnnnnnnnnnnnnnnnnnnnnnnnnnnnnnnnnnnnnnnnnnnnnnnnnnnnnnnnnnnnnnnnnnnnnnnnnnnnnnnnnnnnnnnnnnnnnnnnnnnnnnnnnnnnnnnnnnnnnnnnnnnnnnnnnnnnnnnnnnnnnnnnnnnnnnnnnnnnnnnnnnnnnnnnnnnnnnnnnnnnnnnnnnnnnnnnnnnnnnnnnnnnnnnnnnnnnnnnnnnnnnnnnnnnnnnnnnnnnnnnnnnnnnnnnnnnnnnnnnnnnnnnnnnnnnnnnnnnnnnnnnnnnnnnnnnnnnnnnnnnnnnnnnnnnnnnnnnnnnnnnnnnnnnnnnnnnnnnnnnnnnnnnnnnnnnnnnnnnnnnnnnnnnnnnnnnnnnnnnnnnnnnnnnnnnnnnnnnnnnnnnnnnnnnnnnnnnnnnnnnnnnnnnnnnnnnnnnnnnnnnnnnnnnnnnnnnnnnnnnnnnnnnnnnnnnnnnnnnnnnnnnnnnnnnnnnnnnnnnnnnnnnnnnnnnnnnnnnnnnnnnnnnnnnnnnnnnnnnnnnnnnnnnnnnnnnnnnnnnnnnnnnnnnnnnnnnnnnnnnnnnnnnnnnnnnnnnnnnnnnnnnnnnnnnnnnnnnnnnnnnnnnnnnnnnnnnnnnnnnnnnnnnnnnnnnnnnnnnnnnnnnnnnnnnnnnnnnnnnnnnnnnnnnnnnnnnnnnnnnnnnnnnnnnnnnnnnnnnnnnnnnnnnnnnnnnnnnnnnnnnnnnnnnnnnnnnnnnnnnnnnnnnnnnnnnnnnnnnnnnnnnnnnnnnnnnnnnnnnnnnnnnnnnnnnnnnnnnnnnnnnnnnnnnnnnnnnnnnnnnnnnnnnnnnnnnnnnnnnnnnnnnnnnnnnnnnnnnnnnnnnnnnnnnnnnnnnnnnnnnnnnnnnnnnnnnnnnnnnnnnnnnnnnnnnnnnnnnnnnnnnnnnnnnnnnnnnnnnnnnnnnnnnnnnnnnnnnnnnnnnnnnnnnnnnnnnnnnnnnnnnnnnnnnnnnnnnnnnnnnnnnnnnnnnnnnnnnnnnnnnnnnnnnnnnnnnnnnnnnnnnnnnnnnnnnnnnnnnnnnnnnnnnnnnnnnnnnnnnnnnnnnnnnnnnnnnnnnnnnnnnnnnnnnnnnnnnnnnnnnnnnnnnnnnnnnnnnnnnnnnnnnnnnnnnnnnnnnnnnnnnnnnnnnnnnnnnnnnnnnnnnnnnnnnnnnnnnnnnnnnnnnnnnnnnnnnnnnnnnnnnnnnnnnnnnnnnnnnnnnnnnnnnnnnnnnnnnnnnnnnnnnnnnnnnnnnnnnnnnnnnnnnnnnnnnnnnnnnnnnnnnnnnnnnnnnnnnnnnnnnnnnnnnnnnnnnnnnnnnnnnnnnnnnnnnnnnnnnnnnnnnnnnnnnnnnnnnnnnnnnnnnnnnnnnnnnnnnnnnnnnnnnnnnnnnnnnnnnnnnnnnnnnnnnnnnnnnnnnnnnnnnnnnnnnnnnnnnnnnnnnnnnnnnnnnnnnnnnnnnnnnnnnnnnnnnnnnnnnnnnnnnnnnnnnnnnnnnnnnnnnnnnnnnnnnnnnnnnnnnnnnnnnnnnnnnnnnnnnnnnnnnnnnnnnnnnnnnnnnnnnnnnnnnnnnnnnnnnnnnnnnnnnnnnnnnnnnnnnnnnnnnnnnnnnnnnnnnnnnnnnnnnnnnnnnnnnnnnnnnnnnnnnnnnnnnnnnnnnnnnnnnnnnnnnnnnnnnnnnnnnnnnnnnnnnnnnnnnnnnnnnnnnnnnnnnnnnnnnnnnnnnnnnnnnnnnnnnnnnnnnnnnnnnnnnnnnnnnnnnnnnnnnnnnnnnnnnnnnnnnnnnnnnnnnnnnnnnnnnnnnnnnnnnnnnnnnnnnnnnnnnnnnnnnnnnnnnnnnnnnnnnnnnnnnnnnnnnnnnnnnnnnnnnnnnnnnnnnnnnnnnnnnnnnnnnnnnnnnnnnnnnnnnnnnnnnnnnnnnnnnnnnnnnnnnnnnnnnnnnnnnnnnnnnnnnnnnnnnnnnnnnnnnnnnnnnnnnnnnnnnnnnnnnnnnnnnnnnnnnnnnnnnnnnnnnnnnnnnnnnnnnnnnnnnnnnnnnnnnnnnnnnnnnnnnnnnnnnnnnnnnnnnnnnnnnnnnnnnnnnnnnnnnnnnnnnnnnnnnnnnnnnnnnnnnnnnnnnnnnnnnnnnnnnnnnnnnnnnnnnnnnnnnnnnnnnnnnnnnnnnnnnnnnnnnnnnnnnnnnnnnnnnnnnnnnnnnnnnnnnnnnnnnnnnnnnnnnnnnnnnnnnnnnnnnnnnnnnnnnnnnnnnnnnnnnnnnnnnnnnnnnnnnnnnnnnnnnnnnnnnnnnnnnnnnnnnnnnnnnnnnnnnnnnnnnnnnnnnnnnnnnnnnnnnnnnnnnnnnnnnnnnnnnnnnnnnnnnnnnnnnnnnnnnnnnnnnnnnnnnnnnnnnnnnnnnnnnnnnnnnnnnnnnnnnnnnnnnnnnnnnnnnnnnnnnnnnnnnnnnnnnnnnnnnnnnnnnnnnnnnnnnnnnnnnnnnnnnnnnnnnnnnnnnnnnnnnnnnnnnnnnnnnnnnnnnnnnnnnnnnnnnnnnnnnnnnnnnnnnnnnnnnnnnnnnnnnnnnnnnnnnnnnnnnnnnnnnnnnnnnnnnnnnnnnnnnnnnnnnnnnnnnnnnnnnnnnnnnnnnnnnnnnnnnnnnnnnnnnnnnnnnnnnnnnnnnnnnnnnnnnnnnnnnnnnnnnnnnnnnnnnnnnnnnnnnnnnnnnnnnnnnnnnnnnnnnnnnnnnnnnnnnnnnnnnnnnnnnnnnnnnnnnnnnnnnnnnnnnnnnnnnnnnnnnnnnnnnnnnnnnnnnnnnnnnnnnnnnnnnnnnnnnnnnnnnnnnnnnnnnnnnnnnnnnnnnnnnnnnnnnnnnnnnnnnnnnnnnnnnnnnnnnnnnnnnnnnnnnnnnnnnnnnnnnnnnnnnnnnnnnnnnnnnnnnnnnnnnnnnnnnnnnnnnnnnnnnnnnnnnnnnnnnnnnnnnnnnnnnnnnnnnnnnnnnnnnnnnnnnnnnnnnnnnnnnnnnnnnnnnnnnnnnnnnnnnnnnnnnnnnnnnnnnnnnnnnnnnnnnnnnnnnnnnnnnnnnnnnnnnnnnnnnnnnnnnnnnnnnnnnnnnnnnnnnnnnnnnnnnnnnnnnnnnnnnnnnnnnnnnnnnnnnnnnnnnnnnnnnnnnnnnnnnnnnnnnnnnnnnnnnnnnnnnnnnnnnnnnnnnnnnnnnnnnnnnnnnnnnnnnnnnnnnnnnnnnnnnnnnnnnnnnnnnnnnnnnnnnnnnnnnnnnnnnnnnnnnnnnnnnnnnnnnnnnnnnnnnnnnnnnnnnnnnnnnnnnnnnnnnnnnnnnnnnnnnnnnnnnnnnnnnnnnnnnnnnnnnnnnnnnnnnnnnnnnnnnnnnnnnnnnnnnnnnnnnnnnnnnnnnnnnnnnnnnnnnnnnnnnnnnnnnnnnnnnnnnnnnnnnnnnnnnnnnnnnnnnnnnnnnnnnnnnnnnnnnnnnnnnnnnnnnnnnnnnnnnnnnnnnnnnnnnnnnnnnnnnnnnnnnnnnnnnnnnnnnnnnnnnnnnnnnnnnnnnnnnnnnnnnnnnnnnnnnnnnnnnnnnnnnnnnnnnnnnnnnnnnnnnnnnnnnnnnnnnnnnnnnnnnnnnnnnnnnnnnnnnnnnnnnnnnnnnnnnnnnnnnnnnnnnnnnnnnnnnnnnnnnnnnnnnnnnnnnnnnnnnnnnnnnnnnnnnnnnnnnnnnnnnnnnnnnnnnnnnnnnnnnnnnnnnnnnnnnnnnnnnnnnnnnnnnnnnnnnnnnnnnnnnnnnnnnnnnnnnnnnnnnnnnnnnnnnnnnnnnnnnnnnnnnnnnnnnnnnnnnnnnnnnnnnnnnnnnnnnnnnnnnnnnnnnnnnnnnnnnnnnnnnnnnnnnnnnnnnnnnnnnnnnnnnnnnnnnnnnnnnnnnnnnnnnnnnnnnnnnnnnnnnnnnnnnnnnnnnnnnnnnnnnnnnnnnnnnnnnnnnnnnnnnnnnnnnnnnnnnnnnnnnnnnnnnnnnnnnnnnnnnnnnnnnnnnnnnnnnnnnnnnnnnnnnnnnnnnnnnnnnnnnnnnnnnnnnnnnnnnnnnnnnnnnnnnnnnnnnnnnnnnnnnnnnnnnnnnnnnnnnnnnnnnnnnnnnnnnnnnnnnnnnnnnnnnnnnnnnnnnnnnnnnnnnnnnnnnnnnnnnnnnnnnnnnnnnnnnnnnnnnnnnnnnnnnnnnnnnnnnnnnnnnnnnnnnnnnnnnnnnnnnnnnnnnnnnnnnnnnnnnnnnnnnnnnnnnnnnnnnnnnnnnnnnnnnnnnnnnnnnnnnnnnnnnnnnnnnnnnnnnnnnnnnnnnnnnnnnnnnnnnnnnnnnnnnnnnnnnnnnnnnnnnnnnnnnnnnnnnnnnnnnnnnnnnnnnnnnnnnnnnnnnnnnnnnnnnnnnnnnnnnnnnnnnnnnnnnnnnnnnnnnnnnnnnnnnnnnnnnnnnnnnnnnnnnnnnnnnnnnnnnnnnnnnnnnnnnnnnnnnnnnnnnnnnnnnnnnnnnnnnnnnnnnnnnnnnnnnnnnnnnnnnnnnnnnnnnnnnnnnnnnnnnnnnnnnnnnnnnnnnnnnnnnnnnnnnnnnnnnnnnnnnnnnnnnnnnnnnnnnnnnnnnnnnnnnnnnnnnnnnnnnnnnnnnnnnnnnnnnnnnnnnnnnnnnnnnnnnnnnnnnnnnnnnnnnnnnnnnnnnnnnnnnnnnnnnnnnnnnnnnnnnnnnnnnnnnnnnnnnnnnnnnnnnnnnnnnnnnnnnnnnnnnnnnnnnnnnnnnnnnnnnnnnnnnnnnnnnnnnnnnnnnnnnnnnnnnnnnnnnnnnnnnnnnnnnnnnnnnnnnnnnnnnnnnnnnnnnnnnnnnnnnnnnnnnnnnnnnnnnnnnnnnnnnnnnnnnnnnnnnnnnnnnnnnnnnnnnnnnnnnnnnnnnnnnnnnnnnnnnnnnnnnnnnnnnnnnnnnnnnnnnnnnnnnnnnnnnnnnnnnnnnnnnnnnnnnnnnnnnnnnnnnnnnnnnnnnnnnnnnnnnnnnnnnnnnnnnnnnnnnnnnnnnnnnnnnnnnnnnnnnnnnnnnnnnnnnnnnnnnnnnnnnnnnnnnnnnnnnnnnnnnnnnnnnnnnnnnnnnnnnnnnnnnnnnnnnnnnnnnnnnnnnnnnnnnnnnnnnnnnnnnnnnnnnnnnnnnnnnnnnnnnnnnnnnnnnnnnnnnnnnnnnnnnnnnnnnnnnnnnnnnnnnnnnnnnnnnnnnnnnnnnnnnnnnnnnnnnnnnnnnnnnnnnnnnnnnnnnnnnnnnnnnnnnnnnnnnnnnnnnnnnnnnnnnnnnnnnnnnnnnnnnnnnnnnnnnnnnnnnnnnnnnnnnnnnnnnnnnnnnnnnnnnnnnnnnnnnnnnnnnnnnnnnnnnnnnnnnnnnnnnnnnnnnnnnnnnnnnnnnnnnnnnnnnnnnnnnnnnnnnnnnnnnnnnnnnnnnnnnnnnnnnnnnnnnnnnnnnnnnnnnnnnnnnnnnnnnnnnnnnnnnnnnnnnnnnnnnnnnnnnnnnnnnnnnnnnnnnnnnnnnnnnnnnnnnnnnnnnnnnnnnnnnnnnnnnnnnnnnnnnnnnnnnnnnnnnnnnnnnnnnnnnnnnnnnnnnnnnnnnnnnnnnnnnnnnnnnnnnnnnnnnnnnnnnnnnnnnnnnnnnnnnnnnnnnnnnnnnnnnnnnnnnnnnnnnnnnnnnnnnnnnnnnnnnnnnnnnnnnnnnnnnnnnnnnnnnnnnnnnnnnnnnnnnnnnnnnnnnnnnnnnnnnnnnnnnnnnnnnnnnnnnnnnnnnnnnnnnnnnnnnnnnnnnnnnnnnnnnnnnnnnnnnnnnnnnnnnnnnnnnnnnnnnnnnnnnnnnnnnnnnnnnnnnnnnnnnnnnnnnnnnnnnnnnnnnnnnnnnnnnnnnnnnnnnnnnnnnnnnnnnnnnnnnnnnnnnnnnnnnnnnnnnnnnnnnnnnnnnnnnnnnnnnnnnnnnnnnnnnnnnnnnnnnnnnnnnnnnnnnnnnnnnnnnnnnnnnnnnnnnnnnnnnnnnnnnnnnnnnnnnnnnnnnnnnnnnnnnnnnnnnnnnnnnnnnnnnnnnnnnnnnnnnnnnnnnnnnnnnnnnnnnnnnnnnnnnnnnnnnnnnnnnnnnnnnnnnnnnnnnnnnnnnnnnnnnnnnnnnnnnnnnnnnnnnnnnnnnnnnnnnnnnnnnnnnnnnnnnnnnnnnnnnnnnnnnnnnnnnnnnnnnnnnnnnnnnnnnnnnnnnnnnnnnnnnnnnnnnnnnnnnnnnnnnnnnnnnnnnnnnnnnnnnnnnnnnnnnnnnnnnnnnnnnnnnnnnnnnnnnnnnnnnnnnnnnnnnnnnnnnnnnnnnnnnnnnnnnnnnnnnnnnnnnnnnnnnnnnnnnnnnnnnnnnnnnnnnnnnnnnnnnnnnnnnnnnnnnnnnnnnnnnnnnnnnnnnnnnnnnnnnnnnnnnnnnnnnnnnnnnnnnnnnnnnnnnnnnnnnnnnnnnnnnnnnnnnnnnnnnnnnnnnnnnnnnnnnnnnnnnnnnnnnnnnnnnnnnnnnnnnnnnnnnnnnnnnnnnnnnnnnnnnnnnnnnnnnnnnnnnnnnnnnnnnnnnnnnnnnnnnnnnnnnnnnnnnnnnnnnnnnnnnnnnnnnnnnnnnnnnnnnnnnnnnnnnnnnnnnnnnnnnnnnnnnnnnnnnnnnnnnnnnnnnnnnnnnnnnnnnnnnnnnnnnnnnnnnnnnnnnnnnnnnnnnnnnnnnnnnnnnnnnnnnnnnnnnnnnnnnnnnnnnnnnnnnnnnnnnnnnnnnnnnnnnnnnnnnnnnnnnnnnnnnnnnnnnnnnnnnnnnnnnnnnnnnnnnnnnnnnnnnnnnnnnnnnnnnnnnnnnnnnnnnnnnnnnnnnnnnnnnnnnnnnnnnnnnnnnnnnnnnnnnnnnnnnnnnnnnnnnnnnnnnnnnnnnnnnnnnnnnnnnnnnnnnnnnnnnnnnnnnnnnnnnnnnnnnnnnnnnnnnnnnnnnnnnnnnnnnnnnnnnnnnnnnnnnnnnnnnnnnnnnnnnnnnnnnnnnnnnnnnnnnnnnnnnnnnnnnnnnnnnnnnnnnnnnnnnnnnnnnnnnnnnnnnnnnnnnnnnnnnnnnnnnnnnnnnnnnnnnnnnnnnnnnnnnnnnnnnnnnnnnnnnnnnnnnnnnnnnnnnnnnnnnnnnnnnnnnnnnnnnnnnnnnnnnnnnnnnnnnnnnnnnnnnnnnnnnnnnnnnnnnnnnnnnnnnnnnnnnnnnnnnnnnnnnnnnnnnnnnnnnnnnnnnnnnnnnnnnnnnnnnnnnnnnnnnnnnnnnnnnnnnnnnnnnnnnnnnnnnnnnnnnnnnnnnnnnnnnnnnnnnnnnnnnnnnnnnnnnnnnnnnnnnnnnnnnnnnnnnnnnnnnnnnnnnnnnnnnnnnnnnnnnnnnnnnnnnnnnnnnnnnnnnnnnnnnnnnnnnnnnnnnnnnnnnnnnnnnnnnnnnnnnnnnnnnnnnnnnnnnnnnnnnnnnnnnnnnnnnnnnnnnnnnnnnnnnnnnnnnnnnnnnnnnnnnnnnnnnnnnnnnnnnnnnnnnnnnnnnnnnnnnnnnnnnnnnnnnnnnnnnnnnnnnnnnnnnnnnnnnnnnnnnnnnnnnnnnnnnnnnnnnnnnnnnnnnnnnnnnnnnnnnnnnnnnnnnnnnnnnnnnnnnnnnnnnnnnnnnnnnnnnnnnnnnnnnnnnnnnnnnnnnnnnnnnnnnnnnnnnnnnnnnnnnnnnnnnnnnnnnnnnnnnnnnnnnnnnnnnnnnnnnnnnnnnnnnnnnnnnnnnnnnnnnnnnnnnnnnnnnnnnnnnnnnnnnnnnnnnnnnnnnnnnnnnnnnnnnnnnnnnnnnnnnnnnnnnnnnnnnnnnnnnnnnnnnnnnnnnnnnnnnnnnnnnnnnnnnnnnnnnnnnnnnnnnnnnnnnnnnnnnnnnnnnnnnnnnnnnnnnnnnnnnnnnnnnnnnnnnnnnnnnnnnnnnnnnnnnnnnnnnnnnnnnnnnnnnnnnnnnnnnnnnnnnnnnnnnnnnnnnnnnnnnnnnnnnnnnnnnnnnnnnnnnnnnnnnnnnnnnnnnnnnnnnnnnnnnnnnnnnnnnnnnnnnnnnnnnnnnnnnnnnnnnnnnnnnnnnnnnnnnnnnnnnnnnnnnnnnnnnnnnnnnnnnnnnnnnnnnnnnnnnnnnnnnnnnnnnnnnnnnnnnnnnnnnnnnnnnnnnnnnnnnnnnnnnnnnnnnnnnnnnnnnnnnnnnnnnnnnnnnnnnnnnnnnnnnnnnnnnnnnnnnnnnnnnnnnnnnnnnnnnnnnnnnnnnnnnnnnnnnnnnnnnnnnnnnnnnnnnnnnnnnnnnnnnnnnnnnnnnnnnnnnnnnnnnnnnnnnnnnnnnnnnnnnnnnnnnnnnnnnnnnnnnnnnnnnnnnnnnnnnnnnnnnnnnnnnnnnnnnnnnnnnnnnnnnnnnnnnnnnnnnnnnnnnnnnnnnnnnnnnnnnnnnnnnnnnnnnnnnnnnnnnnnnnnnnnnnnnnnnnnnnnnnnnnnnnnnnnnnnnnnnnnnnnnnnnnnnnnnnnnnnnnnnnnnnnnnnnnnnnnnnnnnnnnnnnnnnnnnnnnnnnnnnnnnnnnnnnnnnnnnnnnnnnnnnnnnnnnnnnnnnnnnnnnnnnnnnnnnnnnnnnnnnnnnnnnnnnnnnnnnnnnnnnnnnnnnnnnnnnnnnnnnnnnnnnnnnnnnnnnnnnnnnnnnnnnnnnnnnnnnnnnnnnnnnnnnnnnnnnnnnnnnnnnnnnnnnnnnnnnnnnnnnnnnnnnnnnnnnnnnnnnnnnnnnnnnnnnnnnnnnnnnnnnnnnnnnnnnnnnnnnnnnnnnnnnnnnnnnnnnnnnnnnnnnnnnnnnnnnnnnnnnnnnnnnnnnnnnnnnnnnnnnnnnnnnnnnnnnnnnnnnnnnnnnnnnnnnnnnnnnnnnnnnnnnnnnnnnnnnnnnnnnnnnnnnnnnnnnnnnnnnnnnnnnnnnnnnnnnnnnnnnnnnnnnnnnnnnnnnnnnnnnnnnnnnnnnnnnnnnnnnnnnnnnnnnnnnnnnnnnnnnnnnnnnnnnnnnnnnnnnnnnnnnnnnnnnnnnnnnnnnnnnnnnnnnnnnnnnnnnnnnnnnnnnnnnnnnnnnnnnnnnnnnnnnnnnnnnnnnnnnnnnnnnnnnnnnnnnnnnnnnnnnnnnnnnnnnnnnnnnnnnnnnnnnnnnnnnnnnnnnnnnnnnnnnnnnnnnnnnnnnnnnnnnnnnnnnnnnnnnnnnnnnnnnnnnnnnnnnnnnnnnnnnnnnnnnnnnnnnnnnnnnnnnnnnnnnnnnnnnnnnnnnnnnnnnnnnnnnnnnnnnnnnnnnnnnnnnnnnnnnnnnnnnnnnnnnnnnnnnnnnnnnnnnnnnnnnnnnnnnnnnnnnnnnnnnnnnnnnnnnnnnnnnnnnnnnnnnnnnnnnnnnnnnnnnnnnnnnnnnnnnnnnnnnnnnnnnnnnnnnnnnnnnnnnnnnnnnnnnnnnnnnnnnnnnnnnnnnnnnnnnnnnnnnnnnnnnnnnnnnnnnnnnnnnnnnnnnnnnnnnnnnnnnnnnnnnnnnnnnnnnnnnnnnnnnnnnnnnnnnnnnnnnnnnnnnnnnnnnnnnnnnnnnnnnnnnnnnnnnnnnnnnnnnnnnnnnnnnnnnnnnnnnnnnnnnnnnnnnnnnnnnnnnnnnnnnnnnnnnnnnnnnnnnnnnnnnnnnnnnnnnnnnnnnnnnnnnnnnnnnnnnnnnnnnnnnnnnnnnnnnnnnnnnnnnnnnnnnnnnnnnnnnnnnnnnnnnnnnnnnnnnnnnnnnnnnnnnnnnnnnnnnnnnnnnnnnnnnnnnnnnnnnnnnnnnnnnnnnnnnnnnnnnnnnnnnnnnnnnnnnnnnnnnnnnnnnnnnnnnnnnnnnnnnnnnnnnnnnnnnnnnnnnnnnnnnnnnnnnnnnnnnnnnnnnnnnnnnnnnnnnnnnnnnnnnnnnnnnnnnnnnnnnnnnnnnnnnnnnnnnnnnnnnnnnnnnnnnnnnnnnnnnnnnnnnnnnnnnnnnnnnnnnnnnnnnnnnnnnnnnnnnnnnnnnnnnnnnnnnnnnnnnnnnnnnnnnnnnnnnnnnnnnnnnnnnnnnnnnnnnnnnnnnnnnnnnnnnnnnnnnnnnnnnnnnnnnnnnnnnnnnnnnnnnnnnnnnnnnnnnnnnnnnnnnnnnnnnnnnnnnnnnnnnnnnnnnnnnnnnnnnnnnnnnnnnnnnnnnnnnnnnnnnnnnnnnnnnnnnnnnnnnnnnnnnnnnnnnnnnnnnnnnnnnnnnnnnnnnnnnnnnnnnnnnnnnnnnnnnnnnnnnnnnnnnnnnnnnnnnnnnnnnnnnnnnnnnnnnnnnnnnnnnnnnnnnnnnnnnnnnnnnnnnnnnnnnnnnnnnnnnnnnnnnnnnnnnnnnnnnnnnnnnnnnnnnnnnnnnnnnnnnnnnnnnnnnnnnnnnnnnnnnnnnnnnnnnnnnnnnnnnnnnnnnnnnnnnnnnnnnnnnnnnnnnnnnnnnnnnnnnnnnnnnnnnnnnnnnnnnnnnnnnnnnnnnnnnnnnnnnnnnnnnnnnnnnnnnnnnnnnnnnnnnnnnnnnnnnnnnnnnnnnnnnnnnnnnnnnnnnnnnnnnnnnnnnnnnnnnnnnnnnnnnnnnnnnnnnnnnnnnnnnnnnnnnnnnnnnnnnnnnnnnnnnnnnnnnnnnnnnnnnnnnnnnnnnnnnnnnnnnnnnnnnnnnnnnnnnnnnnnnnnnnnnnnnnnnnnnnnnnnnnnnnnnnnnnnnnnnnnnnnnnnnnnnnnnnnnnnnnnnnnnnnnnnnnnnnnnnnnnnnnnnnnnnnnnnnnnnnnnnnnnnnnnnnnnnnnnnnnnnnnnnnnnnnnnnnnnnnnnnnnnnnnnnnnnnnnnnnnnnnnnnnnnnnnnnnnnnnnnnnnnnnnnnnnnnnnnnnnnnnnnnnnnnnnnnnnnnnnnnnnnnnnnnnnnnnnnnnnnnnnnnnnnnnnnnnnnnnnnnnnnnnnnnnnnnnnnnnnnnnnnnnnnnnnnnnnnnnnnnnnnnnnnnnnnnnnnnnnnnnnnnnnnnnnnnnnnnnnnnnnnnnnnnnnnnnnnnnnnnnnnnnnnnnnnnnnnnnnnnnnnnnnnnnnnnnnnnnnnnnnnnnnnnnnnnnnnnnnnnnnnnnnnnnnnnnnnnnnnnnnnnnnnnnnnnnnnnnnnnnnnnnnnnnnnnnnnnnnnnnnnnnnnnnnnnnnnnnnnnnnnnnnnnnnnnnnnnnnnnnnnnnnnnnnnnnnnnnnnnnnnnnnnnnnnnnnnnnnnnnnnnnnnnnnnnnnnnnnnnnnnnnnnnnnnnnnnnnnnnnnnnnnnnnnnnnnnnnnnnnnnnnnnnnnnnnnnnnnnnnnnnnnnnnnnnnnnnnnnnnnnnnnnnnnnnnnnnnnnnnnnnnnnnnnnnnnnnnnnnnnnnnnnnnnnnnnnnnnnnnnnnnnnnnnnnnnnnnnnnnnnnnnnnnnnnnnnnnnnnnnnnnnnnnnnnnnnnnnnnnnnnnnnnnnnnnnnnnnnnnnnnnnnnnnnnnnnnnnnnnnnnnnnnnnnnnnnnnnnnnnnnnnnnnnnnnnnnnnnnnnnnnnnnnnnnnnnnnnnnnnnnnnnnnnnnnnnnnnnnnnnnnnnnnnnnnnnnnnnnnnnnnnnnnnnnnnnnnnnnnnnnnnnnnnnnnnnnnnnnnnnnnnnnnnnnnnnnnnnnnnnnnnnnnnnnnnnnnnnnnnnnnnnnnnnnnnnnnnnnnnnnnnnnnnnnnnnnnnnnnnnnnnnnnnnnnnnnnnnnnnnnnnnnnnnnnnnnnnnnnnnnnnnnnnnnnnnnnnnnnnnnnnnnnnnnnnnnnnnnnnnnnnnnnnnnnnnnnnnnnnnnnnnnnnnnnnnnnnnnnnnnnnnnnnnnnnnnnnnnnnnnnnnnnnnnnnnnnnnnnnnnnnnnnnnnnnnnnnnnnnnnnnnnnnnnnnnnnnnnnnnnnnnnnnnnnnnnnnnnnnnnnnnnnnnnnnnnnnnnnnnnnnnnnnnnnnnnnnnnnnnnnnnnnnnnnnnnnnnnnnnnnnnnnnnnnnnnnnnnnnnnnnnnnnnnnnnnnnnnnnnnnnnnnnnnnnnnnnnnnnnnnnnnnnnnnnnnnnnnnnnnnnnnnnnnnnnnnnnnnnnnnnnnnnnnnnnnnnnnnnnnnnnnnnnnnnnnnnnnnnnnnnnnnnnnnnnnnnnnnnnnnnnnnnnnnnnnnnnnnnnnnnnnnnnnnnnnnnnnnnnnnnnnnnnnnnnnnnnnnnnnnnnnnnnnnnnnnnnnnnnnnnnnnnnnnnnnnnnnnnnnnnnnnnnnnnnnnnnnnnnnnnnnnnnnnnnnnnnnnnnnnnnnnnnnnnnnnnnnnnnnnnnnnnnnnnnnnnnnnnnnnnnnnnnnnnnnnnnnnnnnnnnnnnnnnnnnnnnnnnnnnnnnnnnnnnnnnnnnnnnnnnnnnnnnnnnnnnnnnnnnnnnnnnnnnnnnnnnnnnnnnnnnnnnnnnnnnnnnnnnnnnnnnnnnnnnnnnnnnnnnnnnnnnnnnnnnnnnnnnnnnnnnnnnnnnnnnnnnnnnnnnnnnnnnnnnnnnnnnnnnnnnnnnnnnnnnnnnnnnnnnnnnnnnnnnnnnnnnnnnnnnnnnnnnnnnnnnnnnnnnnnnnnnnnnnnnnnnnnnnnnnnnnnnnnnnnnnnnnnnnnnnnnnnnnnnnnnnnnnnnnnnnnnnnnnnnnnnnnnnnnnnnnnnnnnnnnnnnnnnnnnnnnnnnnnnnnnnnnnnnnnnnnnnnnnnnnnnnnnnnnnnnnnnnnnnnnnnnnnnnnnnnnnnnnnnnnnnnnnnnnnnnnnnnnnnnnnnnnnnnnnnnnnnnnnnnnnnnnnnnnnnnnnnnnnnnnnnnnnnnnnnnnnnnnnnnnnnnnnnnnnnnnnnnnnnnnnnnnnnnnnnnnnnnnnnnnnnnnnnnnnnnnnnnnnnnnnnnnnnnnnnnnnnnnnnnnnnnnnnnnnnnnnnnnnnnnnnnnnnnnnnnnnnnnnnnnnnnnnnnnnnnnnnnnnnnnnnnnnnnnnnnnnnnnnnnnnnnnnnnnnnnnnnnnnnnnnnnnnnnnnnnnnnnnnnnnnnnnnnnnnnnnnnnnnnnnnnnnnnnnnnnnnnnnnnnnnnnnnnnnnnnnnnnnnnnnnnnnnnnnnnnnnnnnnnnnnnnnnnnnnnnnnnnnnnnnnnnnnnnnnnnnnnnnnnnnnnnnnnnnnnnnnnnnnnnnnnnnnnnnnnnnnnnnnnnnnnnnnnnnnnnnnnnnnnnnnnnnnnnnnnnnnnnnnnnnnnnnnnnnnnnnnnnnnnnnnnnnnnnnnnnnnnnnnnnnnnnnnnnnnnnnnnnnnnnnnnnnnnnnnnnnnnnnnnnnnnnnnnnnnnnnnnnnnnnnnnnnnnnnnnnnnnnnnnnnnnnnnnnnnnnnnnnnnnnnnnnnnnnnnnnnnnnnnnnnnnnnnnnnnnnnnnnnnnnnnnnnnnnnnnnnnnnnnnnnnnnnnnnnnnnnnnnnnnnnnnnnnnnnnnnnnnnnnnnnnnnnnnnnnnnnnnnnnnnnnnnnnnnnnnnnnnnnnnnnnnnnnnnnnnnnnnnnnnnnnnnnnnnnnnnnnnnnnnnnnnnnnnnnnnnnnnnnnnnnnnnnnnnnnnnnnnnnnnnnnnnnnnnnnnnnnnnnnnnnnnnnnnnnnnnnnnnnnnnnnnnnnnnnnnnnnnnnnnnnnnnnnnnnnnnnnnnnnnnnnnnnnnnnnnnnnnnnnnnnnnnnnnnnnnnnnnnnnnnnnnnnnnnnnnnnnnnnnnnnnnnnnnnnnnnnnnnnnnnnnnnnnnnnnnnnnnnnnnnnnnnnnnnnnnnnnnnnnnnnnnnnnnnnnnnnnnnnnnnnnnnnnnnnnnnnnnnnnnnnnnnnnnnnnnnnnnnnnnnnnnnnnnnnnnnnnnnnnnnnnnnnnnnnnnnnnnnnnnnnnnnnnnnnnnnnnnnnnnnnnnnnnnnnnnnnnnnnnnnnnnnnnnnnnnnnnnnnnnnnnnnnnnnnnnnnnnnnnnnnnnnnnnnnnnnnnnnnnnnnnnnnnnnnnnnnnnnnnnnnnnnnnnnnnnnnnnnnnnnnnnnnnnnnnnnnnnnnnnnnnnnnnnnnnnnnnnnnnnnnnnnnnnnnnnnnnnnnnnnnnnnnnnnnnnnnnnnnnnnnnnnnnnnnnnnnnnnnnnnnnnnnnnnnnnnnnnnnnnnnnnnnnnnnnnnnnnnnnnnnnnnnnnnnnnnnnnnnnnnnnnnnnnnnnnnnnnnnnnnnnnnnnnnnnnnnnnnnnnnnnnnnnnnnnnnnnnnnnnnnnnnnnnnnnnnnnnnnnnnnnnnnnnnnnnnnnnnnnnnnnnnnnnnnnnnnnnnnnnnnnnnnnnnnnnnnnnnnnnnnnnnnnnnnnnnnnnnnnnnnnnnnnnnnnnnnnnnnnnnnnnnnnnnnnnnnnnnnnnnnnnnnnnnnnnnnnnnnnnnnnnnnnnnnnnnnnnnnnnnnnnnnnnnnnnnnnnnnnnnnnnnnnnnnnnnnnnnnnnnnnnnnnnnnnnnnnnnnnnnnnnnnnnnnnnnnnnnnnnnnnnnnnnnnnnnnnnnnnnnnnnnnnnnnnnnnnnnnnnnnnnnnnnnnnnnnnnnnnnnnnnnnnnnnnnnnnnnnnnnnnnnnnnnnnnnnnnnnnnnnnnnnnnnnnnnnnnnnnnnnnnnnnnnnnnnnnnnnnnnnnnnnnnnnnnnnnnnnnnnnnnnnnnnnnnnnnnnnnnnnnnnnnnnnnnnnnnnnnnnnnnnnnnnnnnnnnnnnnnnnnnnnnnnnnnnnnnnnnnnnnnnnnnnnnnnnnnnnnnnnnnnnnnnnnnnnnnnnnnnnnnnnnnnnnnnnnnnnnnnnnnnnnnnnnnnnnnnnnnnnnnnnnnnnnnnnnnnnnnnnnnnnnnnnnnnnnnnnnnnnnnnnnnnnnnnnnnnnnnnnnnnnnnnnnnnnnnnnnnnnnnnnnnnnnnnnnnnnnnnnnnnnnnnnnnnnnnnnnnnnnnnnnnnnnnnnnnnnnnnnnnnnnnnnnnnnnnnnnnnnnnnnnnnnnnnnnnnnnnnnnnnnnnnnnnnnnnnnnnnnnnnnnnnnnnnnnnnnnnnnnnnnnnnnnnnnnnnnnnnnnnnnnnnnnnnnnnnnnnnnnnnnnnnnnnnnnnnnnnnnnnnnnnnnnnnnnnnnnnnnnnnnnnnnnnnnnnnnnnnnnnnnnnnnnnnnnnnnnnnnnnnnnnnnnnnnnnnnnnnnnnnnnnnnnnnnnnnnnnnnnnnnnnnnnnnnnnnnnnnnnnnnnnnnnnnnnnnnnnnnnnnnnnnnnnnnnnnnnnnnnnnnnnnnnnnnnnnnnnnnnnnnnnnnnnnnnnnnnnnnnnnnnnnnnnnnnnnnnnnnnnnnnnnnnnnnnnnnnnnnnnnnnnnnnnnnnnnnnnnnnnnnnnnnnnnnnnnnnnnnnnnnnnnnnnnnnnnnnnnnnnnnnnnnnnnnnnnnnnnnnnnnnnnnnnnnnnnnnnnnnnnnnnnnnnnnnnnnnnnnnnnnnnnnnnnnnnnnnnnnnnnnnnnnnnnnnnnnnnnnnnnnnnnnnnnnnnnnnnnnnnnnnnnnnnnnnnnnnnnnnnnnnnnnnnnnnnnnnnnnnnnnnnnnnnnnnnnnnnnnnnnnnnnnnnnnnnnnnnnnnnnnnnnnnnnnnnnnnnnnnnnnnnnnnnnnnnnnnnnnnnnnnnnnnnnnnnnnnnnnnnnnnnnnnnnnnnnnnnnnnnnnnnnnnnnnnnnnnnnnnnnnnnnnnnnnnnnnnnnnnnnnnnnnnnnnnnnnnnnnnnnnnnnnnnnnnnnnnnnnnnnnnnnnnnnnnnnnnnnnnnnnnnnnnnnnnnnnnnnnnnnnnnnnnnnnnnnnnnnnnnnnnnnnnnnnnnnnnnnnnnnnnnnnnnnnnnnnnnnnnnnnnnnnnnnnnnnnnnnnnnnnnnnnnnnnnnnnnnnnnnnnnnnnnnnnnnnnnnnnnnnnnnnnnnnnnnnnnnnnnnnnnnnnnnnnnnnnnnnnnnnnnnnnnnnnnnnnnnnnnnnnnnnnnnnnnnnnnnnnnnnnnnnnnnnnnnnnnnnnnnnnnnnnnnnnnnnnnnnnnnnnnnnnnnnnnnnnnnnnnnnnnnnnnnnnnnnnnnnnnnnnnnnnnnnnnnnnnnnnnnnnnnnnnnnnnnnnnnnnnnnnnnnnnnnnnnnnnnnnnnnnnnnnnnnnnnnnnnnnnnnnnnnnnnnnnnnnnnnnnnnnnnnnnnnnnnnnnnnnnnnnnnnnnnnnnnnnnnnnnnnnnnnnnnnnnnnnnnnnnnnnnnnnnnnnnnnnnnnnnnnnnnnnnnnnnnnnnnnnnnnnnnnnnnnnnnnnnnnnnnnnnnnnnnnnnnnnnnnnnnnnnnnnnnnnnnnnnnnnnnnnnnnnnnnnnnnnnnnnnnnnnnnnnnnnnnnnnnnnnnnnnnnnnnnnnnnnnnnnnnnnnnnnnnnnnnnnnnnnnnnnnnnnnnnnnnnnnnnnnnnnnnnnnnnnnnnnnnnnnnnnnnnnnnnnnnnnnnnnnnnnnnnnnnnnnnnnnnnnnnnnnnnnnnnnnnnnnnnnnnnnnnnnnnnnnnnnnnnnnnnnnnnnnnnnnnnnnnnnnnnnnnnnnnnnnnnnnnnnnnnnnnnnnnnnnnnnnnnnnnnnnnnnnnnnnnnnnnnnnnnnnnnnnnnnnnnnnnnnnnnnnnnnnnnnnnnnnnnnnnnnnnnnnnnnnnnnnnnnnnnnnnnnnnnnnnnnnnnnnnnnnnnnnnnnnnnnnnnnnnnnnnnnnnnnnnnnnnnnnnnnnnnnnnnnnnnnnnnnnnnnnnnnnnnnnnnnnnnnnnnnnnnnnnnnnnnnnnnnnnnnnnnnnnnnnnnnnnnnnnnnnnnnnnnnnnnnnnnnnnnnnnnnnnnnnnnnnnnnnnnnnnnnnnnnnnnnnnnnnnnnnnnnnnnnnnnnnnnnnnnnnnnnnnnnnnnnnnnnnnnnnnnnnnnnnnnnnnnnnnnnnnnnnnnnnnnnnnnnnnnnnnnnnnnnnnnnnnnnnnnnnnnnnnnnnnnnnnnnnnnnnnnnnnnnnnnnnnnnnnnnnnnnnnnnnnnnnnnnnnnnnnnnnnnnnnnnnnnnnnnnnnnnnnnnnnnnnnnnnnnnnnnnnnnnnnnnnnnnnnnnnnnnnnnnnnnnnnnnnnnnnnnnnnnnnnnnnnnnnnnnnnnnnnnnnnnnnnnnnnnnnnnnnnnnnnnnnnnnnnnnnnnnnnnnnnnnnnnnnnnnnnnnnnnnnnnnnnnnnnnnnnnnnnnnnnnnnnnnnnnnnnnnnnnnnnnnnnnnnnnnnnnnnnnnnnnnnnnnnnnnnnnnnnnnnnnnnnnnnnnnnnnnnnnnnnnnnnnnnnnnnnnnnnnnnnnnnnnnnnnnnnnnnnnnnnnnnnnnnnnnnnnnnnnnnnnnnnnnnnnnnnnnnnnnnnnnnnnnnnnnnnnnnnnnnnnnnnnnnnnnnnnnnnnnnnnnnnnnnnnnnnnnnnnnnnnnnnnnnnnnnnnnnnnnnnnnnnnnnnnnnnnnnnnnnnnnnnnnnnnnnnnnnnnnnnnnnnnnnnnnnnnnnnnnnnnnnnnnnnnnnnnnnnnnnnnnnnnnnnnnnnnnnnnnnnnnnnnnnnnnnnnnnnnnnnnnnnnnnnnnnnnnnnnnnnnnnnnnnnnnnnnnnnnnnnnnnnnnnnnnnnnnnnnnnnnnnnnnnnnnnnnnnnnnnnnnnnnnnnnnnnnnnnnnnnnnnnnnnnnnnnnnnnnnnnnnnnnnnnnnnnnnnnnnnnnnnnnnnnnnnnnnnnnnnnnnnnnnnnnnnnnnnnnnnnnnnnnnnnnnnnnnnnnnnnnnnnnnnnnnnnnnnnnnnnnnnnnnnnnnnnnnnnnnnnnnnnnnnnnnnnnnnnnnnnnnnnnnnnnnnnnnnnnnnnnnnnnnnnnnnnnnnnnnnnnnnnnnnnnnnnnnnnnnnnnnnnnnnnnnnnnnnnnnnnnnnnnnnnnnnnnnnnnnnnnnnnnnnnnnnnnnnnnnnnnnnnnnnnnnnnnnnnnnnnnnnnnnnnnnnnnnnnnnnnnnnnnnnnnnnnnnnnnnnnnnnnnnnnnnnnnnnnnnnnnnnnnnnnnnnnnnnnnnnnnnnnnnnnnnnnnnnnnnnnnnnnnnnnnnnnnnnnnnnnnnnnnnnnnnnnnnnnnnnnnnnnnnnnnnnnnnnnnnnnnnnnnnnnnnnnnnnnnnnnnnnnnnnnnnnnnnnnnnnnnnnnnnnnnnnnnnnnnnnnnnnnnnnnnnnnnnnnnnnnnnnnnnnnnnnnnnnnnnnnnnnnnnnnnnnnnnnnnnnnnnnnnnnnnnnnnnnnnnnnnnnnnnnnnnnnnnnnnnnnnnnnnnnnnnnnnnnnnnnnnnnnnnnnnnnnnnnnnnnnnnnnnnnnnnnnnnnnnnnnnnnnnnnnnnnnnnnnnnnnnnnnnnnnnnnnnnnnnnnnnnnnnnnnnnnnnnnnnnnnnnnnnnnnnnnnnnnnnnnnnnnnnnnnnnnnnnnnnnnnnnnnnnnnnnnnnnnnnnnnnnnnnnnnnnnnnnnnnnnnnnnnnnnnnnnnnnnnnnnnnnnnnnnnnnnnnnnnnnnnnnnnnnnnnnnnnnnnnnnnnnnnnnnnnnnnnnnnnnnnnnnnnnnnnnnnnnnnnnnnnnnnnnnnnnnnnnnnnnnnnnnnnnnnnnnnnnnnnnnnnnnnnnnnnnnnnnnnnnnnnnnnnnnnnnnnnnnnnnnnnnnnnnnnnnnnnnnnnnnnnnnnnnnnnnnnnnnnnnnnnnnnnnnnnnnnnnnnnnnnnnnnnnnnnnnnnnnnnnnnnnnnnnnnnnnnnnnnnnnnnnnnnnnnnnnnnnnnnnnnnnnnnnnnnnnnnnnnnnnnnnnnnnnnnnnnnnnnnnnnnnnnnnnnnnnnnnnnnnnnnnnnnnnnnnnnnnnnnnnnnnnnnnnnnnnnnnnnnnnnnnnnnnnnnnnnnnnnnnnnnnnnnnnnnnnnnnnnnnnnnnnnnnnnnnnnnnnnnnnnnnnnnnnnnnnnnnnnnnnnnnnnnnnnnnnnnnnnnnnnnnnnnnnnnnnnnnnnnnnnnnnnnnnnnnnnnnnnnnnnnnnnnnnnnnnnnnnnnnnnnnnnnnnnnnnnnnnnnnnnnnnnnnnnnnnnnnnnnnnnnnnnnnnnnnnnnnnnnnnnnnnnnnnnnnnnnnnnnnnnnnnnnnnnnnnnnnnnnnnnnnnnnnnnnnnnnnnnnnnnnnnnnnnnnnnnnnnnnnnnnnnnnnnnnnnnnnnnnnnnnnnnnnnnnnnnnnnnnnnnnnnnnnnnnnnnnnnnnnnnnnnnnnnnnnnnnnnnnnnnnnnnnnnnnnnnnnnnnnnnnnnnnnnnnnnnnnnnnnnnnnnnnnnnnnnnnnnnnnnnnnnnnnnnnnnnnnnnnnnnnnnnnnnnnnnnnnnnnnnnnnnnnnnnnnnnnnnnnnnnnnnnnnnnnnnnnnnnnnnnnnnnnnnnnnnnnnnnnnnnnnnnnnnnnnnnnnnnnnnnnnnnnnnnnnnnnnnnnnnnnnnnnnnnnnnnnnnnnnnnnnnnnnnnnnnnnnnnnnnnnnnnnnnnnnnnnnnnnnnnnnnnnnnnnnnnnnnnnnnnnnnnnnnnnnnnnnnnnnnnnnnnnnnnnnnnnnnnnnnnnnnnnnnnnnnnnnnnnnnnnnnnnnnnnnnnnnnnnnnnnnnnnnnnnnnnnnnnnnnnnnnnnnnnnnnnnnnnnnnnnnnnnnnnnnnnnnnnnnnnnnnnnnnnnnnnnnnnnnnnnnnnnnnnnnnnnnnnnnnnnnnnnnnnnnnnnnnnnnnnnnnnnnnnnnnnnnnnnnnnnnnnnnnnnnnnnnnnnnnnnnnnnnnnnnnnnnnnnnnnnnnnnnnnnnnnnnnnnnnnnnnnnnnnnnnnnnnnnnnnnnnnnnnnnnnnnnnnnnnnnnnnnnnnnnnnnnnnnnnnnnnnnnnnnnnnnnnnnnnnnnnnnnnnnnnnnnnnnnnnnnnnnnnnnnnnnnnnnnnnnnnnnnnnnnnnnnnnnnnnnnnnnnnnnnnnnnnnnnnnnnnnnnnnnnnnnnnnnnnnnnnnnnnnnnnnnnnnnnnnnnnnnnnnnnnnnnnnnnnnnnnnnnnnnnnnnnnnnnnnnnnnnnnnnnnnnnnnnnnnnnnnnnnnnnnnnnnnnnnnnnnnnnnnnnnnnnnnnnnnnnnnnnnnnnnnnnnnnnnnnnnnnnnnnnnnnnnnnnnnnnnnnnnnnnnnnnnnnnnnnnnnnnnnnnnnnnnnnnnnnnnnnnnnnnnnnnnnnnnnnnnnnnnnnnnnnnnnnnnnnnnnnnnnnnnnnnnnnnnnnnnnnnnnnnnnnnnnnnnnnnnnnnnnnnnnnnnnnnnnnnnnnnnnnnnnnnnnnnnnnnnnnnnnnnnnnnnnnnnnnnnnnnnnnnnnnnnnnnnnnnnnnnnnnnnnnnnnnnnnnnnnnnnnnnnnnnnnnnnnnnnnnnnnnnnnnnnnnnnnnnnnnnnnnnnnnnnnnnnnnnnnnnnnnnnnnnnnnnnnnnnnnnnnnnnnnnnnnnnnnnnnnnnnnnnnnnnnnnnnnnnnnnnnnnnnnnnnnnnnnnnnnnnnnnnnnnnnnnnnnnnnnnnnnnnnnnnnnnnnnnnnnnnnnnnnnnnnnnnnnnnnnnnnnnnnnnnnnnnnnnnnnnnnnnnnnnnnnnnnnnnnnnnnnnnnnnnnnnnnnnnnnnnnnnnnnnnnnnnnnnnnnnnnnnnnnnnnnnnnnnnnnnnnnnnnnnnnnnnnnnnnnnnnnnnnnnnnnnnnnnnnnnnnnnnnnnnnnnnnnnnnnnnnnnnnnnnnnnnnnnnnnnnnnnnnnnnnnnnnnnnnnnnnnnnnnnnnnnnnnnnnnnnnnnnnnnnnnnnnnnnnnnnnnnnnnnnnnnnnnnnnnnnnnnnnnnnnnnnnnnnnnnnnnnnnnnnnnnnnnnnnnnnnnnnnnnnnnnnnnnnnnnnnnnnnnnnnnnnnnnnnnnnnnnnnnnnnnnnnnnnnnnnnnnnnnnnnnnnnnnnnnnnnnnnnnnnnnnnnnnnnnnnnnnnnnnnnnnnnnnnnnnnnnnnnnnnnnnnnnnnnnnnnnnnnnnnnnnnnnnnnnnnnnnnnnnnnnnnnnnnnnnnnnnnnnnnnnnnnnnnnnnnnnnnnnnnnnnnnnnnnnnnnnnnnnnnnnnnnnnnnnnnnnnnnnnnnnnnnnnnnnnnnnnnnnnnnnnnnnnnnnnnnnnnnnnnnnnnnnnnnnnnnnnnnnnnnnnnnnnnnnnnnnnnnnnnnnnnnnnnnnnnnnnnnnnnnnnnnnnnnnnnnnnnnnnnnnnnnnnnnnnnnnnnnnnnnnnnnnnnnnnnnnnnnnnnnnnnnnnnnnnnnnnnnnnnnnnnnnnnnnnnnnnnnnnnnnnnnnnnnnnnnnnnnnnnnnnnnnnnnnnnnnnnnnnnnnnnnnnnnnnnnnnnnnnnnnnnnnnnnnnnnnnnnnnnnnnnnnnnnnnnnnnnnnnnnnnnnnnnnnnnnnnnnnnnnnnnnnnnnnnnnnnnnnnnnnnnnnnnnnnnnnnnnnnnnnnnnnnnnnnnnnnnnnnnnnnnnnnnnnnnnnnnnnnnnnnnnnnnnnnnnnnnnnnnnnnnnnnnnnnnnnnnnnnnnnnnnnnnnnnnnnnnnnnnnnnnnnnnnnnnnnnnnnnnnnnnnnnnnnnnnnnnnnnnnnnnnnnnnnnnnnnnnnnnnnnnnnnnnnnnnnnnnnnnnnnnnnnnnnnnnnnnnnnnnnnnnnnnnnnnnnnnnnnnnnnnnnnnnnnnnnnnnnnnnnnnnnnnnnnnnnnnnnnnnnnnnnnnnnnnnnnnnnnnnnnnnnnnnnnnnnnnnnnnnnnnnnnnnnnnnnnnnnnnnnnnnnnnnnnnnnnnnnnnnnnnnnnnnnnnnnnnnnnnnnnnnnnnnnnnnnnnnnnnnnnnnnnnnnnnnnnnnnnnnnnnnnnnnnnnnnnnnnnnnnnnnnnnnnnnnnnnnnnnnnnnnnnnnnnnnnnnnnnnnnnnnnnnnnnnnnnnnnnnnnnnnnnnnnnnnnnnnnnnnnnnnnnnnnnnnnnnnnnnnnnnnnnnnnnnnnnnnnnnnnnnnnnnnnnnnnnnnnnnnnnnnnnnnnnnnnnnnnnnnnnnnnnnnnnnnnnnnnnnnnnnnnnnnnnnnnnnnnnnnnnnnnnnnnnnnnnnnnnnnnnnnnnnnnnnnnnnnnnnnnnnnnnnnnnnnnnnnnnnnnnnnnnnnnnnnnnnnnnnnnnnnnnnnnnnnnnnnnnnnnnnnnnnnnnnnnnnnnnnnnnnnnnnnnnnnnnnnnnnnnnnnnnnnnnnnnnnnnnnnnnnnnnnnnnnnnnnnnnnnnnnnnnnnnnnnnnnnnnnnnnnnnnnnnnnnnnnnnnnnnnnnnnnnnnnnnnnnnnnnnnnnnnnnnnnnnnnnnnnnnnnnnnnnnnnnnnnnnnnnnnnnnnnnnnnnnnnnnnnnnnnnnnnnnnnnnnnnnnnnnnnnnnnnnnnnnnnnnnnnnnnnnnnnnnnnnnnnnnnnnnnnnnnnnnnnnnnnnnnnnnnnnnnnnnnnnnnnnnnnnnnnnnnnnnnnnnnnnnnnnnnnnnnnnnnnnnnnnnnnnnnnnnnnnnnnnnnnnnnnnnnnnnnnnnnnnnnnnnnnnnnnnnnnnnnnnnnnnnnnnnnnnnnnnnnnnnnnnnnnnnnnnnnnnnnnnnnnnnnnnnnnnnnnnnnnnnnnnnnnnnnnnnnnnnnnnnnnnnnnnnnnnnnnnnnnnnnnnnnnnnnnnnnnnnnnnnnnnnnnnnnnnnnnnnnnnnnnnnnnnnnnnnnnnnnnnnnnnnnnnnnnnnnnnnnnnnnnnnnnnnnnnnnnnnnnnnnnnnnnnnnnnnnnnnnnnnnnnnnnnnnnnnnnnnnnnnnnnnnnnnnnnnnnnnnnnnnnnnnnnnnnnnnnnnnnnnnnnnnnnnnnnnnnnnnnnnnnnnnnnnnnnnnnnnnnnnnnnnnnnnnnnnnnnnnnnnnnnnnnnnnnnnnnnnnnnnnnnnnnnnnnnnnnnnnnnnnnnnnnnnnnnnnnnnnnnnnnnnnnnnnnnnnnnnnnnnnnnnnnnnnnnnnnnnnnnnnnnnnnnnnnnnnnnnnnnnnnnnnnnnnnnnnnnnnnnnnnnnnnnnnnnnnnnnnnnnnnnnnnnnnnnnnnnnnnnnnnnnnnnnnnnnnnnnnnnnnnnnnnnnnnnnnnnnnnnnnnnnnnnnnnnnnnnnnnnnnnnnnnnnnnnnnnnnnnnnnnnnnnnnnnnnnnnnnnnnnnnnnnnnnnnnnnnnnnnnnnnnnnnnnnnnnnnnnnnnnnnnnnnnnnnnnnnnnnnnnnnnnnnnnnnnnnnnnnnnnnnnnnnnnnnnnnnnnnnnnnnnnnnnnnnnnnnnnnnnnnnnnnnnnnnnnnnnnnnnnnnnnnnnnnnnnnnnnnnnnnnnnnnnnnnnnnnnnnnnnnnnnnnnnnnnnnnnnnnnnnnnnnnnnnnnnnnnnnnnnnnnnnnnnnnnnnnnnnnnnnnnnnnnnnnnnnnnnnnnnnnnnnnnnnnnnnnnnnnnnnnnnnnnnnnnnnnnnnnnnnnnnnnnnnnnnnnnnnnnnnnnnnnnnnnnnnnnnnnnnnnnnnnnnnnnnnnnnnnnnnnnnnnnnnnnnnnnnnnnnnnnnnnnnnnnnnnnnnnnnnnnnnnnnnnnnnnnnnnnnnnnnnnnnnnnnnnnnnnnnnnnnnnnnnnnnnnnnnnnnnnnnnnnnnnnnnnnnnnnnnnnnnnnnnnnnnnnnnnnnnnnnnnnnnnnnnnnnnnnnnnnnnnnnnnnnnnnnnnnnnnnnnnnnnnnnnnnnnnnnnnnnnnnnnnnnnnnnnnnnnnnnnnnnnnnnnnnnnnnnnnnnnnnnnnnnnnnnnnnnnnnnnnnnnnnnnnnnnnnnnnnnnnnnnnnnnnnnnnnnnnnnnnnnnnnnnnnnnnnnnnnnnnnnnnnnnnnnnnnnnnnnnnnnnnnnnnnnnnnnnnnnnnnnnnnnnnnnnnnnnnnnnnnnnnnnnnnnnnnnnnnnnnnnnnnnnnnnnnnnnnnnnnnnnnnnnnnnnnnnnnnnnnnnnnnnnnnnnnnnnnnnnnnnnnnnnnnnnnnnnnnnnnnnnnnnnnnnnnnnnnnnnnnnnnnnnnnnnnnnnnnnnnnnnnnnnnnnnnnnnnnnnnnnnnnnnnnnnnnnnnnnnnnnnnnnnnnnnnnnnnnnnnnnnnnnnnnnnnnnnnnnnnnnnnnnnnnnnnnnnnnnnnnnnnnnnnnnnnnnnnnnnnnnnnnnnnnnnnnnnnnnnnnnnnnnnnnnnnnnnnnnnnnnnnnnnnnnnnnnnnnnnnnnnnnnnnnnnnnnnnnnnnnnnnnnnnnnnnnnnnnnnnnnnnnnnnnnnnnnnnnnnnnnnnnnnnnnnnnnnnnnnnnnnnnnnnnnnnnnnnnnnnnnnnnnnnnnnnnnnnnnnnnnnnnnnnnnnnnnnnnnnnnnnnnnnnnnnnnnnnnnnnnnnnnnnnnnnnnnnnnnnnnnnnnnnnnnnnnnnnnnnnnnnnnnnnnnnnnnnnnnnnnnnnnnnnnnnnnnnnnnnnnnnnnnnnnnnnnnnnnnnnnnnnnnnnnnnnnnnnnnnnnnnnnnnnnnnnnnnnnnnnnnnnnnnnnnnnnnnnnnnnnnnnnnnnnnnnnnnnnnnnnnnnnnnnnnnnnnnnnnnnnnnnnnnnnnnnnnnnnnnnnnnnnnnnnnnnnnnnnnnnnnnnnnnnnnnnnnnnnnnnnnnnnnnnnnnnnnnnnnnnnnnnnnnnnnnnnnnnnnnnnnnnnnnnnnnnnnnnnnnnnnnnnnnnnnnnnnnnnnnnnnnnnnnnnnnnnnnnnnnnnnnnnnnnnnnnnnnnnnnnnnnnnnnnnnnnnnnnnnnnnnnnnnnnnnnnnnnnnnnnnnnnnnnnnnnnnnnnnnnnnnnnnnnnnnnnnnnnnnnnnnnnnnnnnnnnnnnnnnnnnnnnnnnnnnnnnnnnnnnnnnnnnnnnnnnnnnnnnnnnnnnnnnnnnnnnnnnnnnnnnnnnnnnnnnnnnnnnnnnnnnnnnnnnnnnnnnnnnnnnnnnnnnnnnnnnnnnnnnnnnnnnnnnnnnnnnnnnnnnnnnnnnnnnnnnnnnnnnnnnnnnnnnnnnnnnnnnnnnnnnnnnnnnnnnnnnnnnnnnnnnnnnnnnnnnnnnnnnnnnnnnnnnnnnnnnnnnnnnnnnnnnnnnnnnnnnnnnnnnnnnnnnnnnnnnnnnnnnnnnnnnnnnnnnnnnnnnnnnnnnnnnnnnnnnnnnnnnnnnnnnnnnnnnnnnnnnnnnnnnnnnnnnnnnnnnnnnnnnnnnnnnnnnnnnnnnnnnnnnnnnnnnnnnnnnnnnnnnnnnnnnnnnnnnnnnnnnnnnnnnnnnnnnnnnnnnnnnnnnnnnnnnnnnnnnnnnnnnnnnnnnnnnnnnnnnnnnnnnnnnnnnnnnnnnnnnnnnnnnnnnnnnnnnnnnnnnnnnnnnnnnnnnnnnnnnnnnnnnnnnnnnnnnnnnnnnnnnnnnnnnnnnnnnnnnnnnnnnnnnnnnnnnnnnnnnnnnnnnnnnnnnnnnnnnnnnnnnnnnnnnnnnnnnnnnnnnnnnnnnnnnnnnnnnnnnnnnnnnnnnnnnnnnnnnnnnnnnnnnnnnnnnnnnnnnnnnnnnnnnnnnnnnnnnnnnnnnnnnnnnnnnnnnnnnnnnnnnnnnnnnnnnnnnnnnnnnnnnnnnnnnnnnnnnnnnnnnnnnnnnnnnnnnnnnnnnnnnnnnnnnnnnnnnnnnnnnnnnnnnnnnnnnnnnnnnnnnnnnnnnnnnnnnnnnnnnnnnnnnnnnnnnnnnnnnnnnnnnnnnnnnnnnnnnnnnnnnnnnnnnnnnnnnnnnnnnnnnnnnnnnnnnnnnnnnnnnnnnnnnnnnnnnnnnnnnnnnnnnnnnnnnnnnnnnnnnnnnnnnnnnnnnnnnnnnnnnnnnnnnnnnnnnnnnnnnnnnnnnnnnnnnnnnnnnnnnnnnnnnnnnnnnnnnnnnnnnnnnnnnnnnnnnnnnnnnnnnnnnnnnnnnnnnnnnnnnnnnnnnnnnnnnnnnnnnnnnnnnnnnnnnnnnnnnnnnnnnnnnnnnnnnnnnnnnnnnnnnnnnnnnnnnnnnnnnnnnnnnnnnnnnnnnnnnnnnnnnnnnnnnnnnnnnnnnnnnnnnnnnnnnnnnnnnnnnnnnnnnnnnnnnnnnnnnnnnnnnnnnnnnnnnnnnnnnnnnnnnnnnnnnnnnnnnnnnnnnnnnnnnnnnnnnnnnnnnnnnnnnnnnnnnnnnnnnnnnnnnnnnnnnnnnnnnnnnnnnnnnnnnnnnnnnnnnnnnnnnnnnnnnnnnnnnnnnnnnnnnnnnnnnnnnnnnnnnnnnnnnnnnnnnnnnnnnnnnnnnnnnnnnnnnnnnnnnnnnnnnnnnnnnnnnnnnnnnnnnnnnnnnnnnnnnnnnnnnnnnnnnnnnnnnnnnnnnnnnnnnnnnnnnnnnnnnnnnnnnnnnnnnnnnnnnnnnnnnnnnnnnnnnnnnnnnnnnnnnnnnnnnnnnnnnnnnnnnnnnnnnnnnnnnnnnnnnnnnnnnnnnnnnnnnnnnnnnnnnnnnnnnnnnnnnnnnnnnnnnnnnnnnnnnnnnnnnnnnnnnnnnnnnnnnnnnnnnnnnnnnnnnnnnnnnnnnnnnnnnnnnnnnnnnnnnnnnnnnnnnnnnnnnnnnnnnnnnnnnnnnnnnnnnnnnnnnnnnnnnnnnnnnnnnnnnnnnnnnnnnnnnnnnnnnnnnnnnnnnnnnnnnnnnnnnnnnnnnnnnnnnnnnnnnnnnnnnnnnnnnnnnnnnnnnnnnnnnnnnnnnnnnnnnnnnnnnnnnnnnnnnnnnnnnnnnnnnnnnnnnnnnnnnnnnnnnnnnnnnnnnnnnnnnnnnnnnnnnnnnnnnnnnnnnnnnnnnnnnnnnnnnnnnnnnnnnnnnnnnnnnnnnnnnnnnnnnnnnnnnnnnnnnnnnnnnnnnnnnnnnnnnnnnnnnnnnnnnnnnnnnnnnnnnnnnnnnnnnnnnnnnnnnnnnnnnnnnnnnnnnnnnnnnnnnnnnnnnnnnnnnnnnnnnnnnnnnnnnnnnnnnnnnnnnnnnnnnnnnnnnnnnnnnnnnnnnnnnnnnnnnnnnnnnnnnnnnnnnnnnnnnnnnnnnnnnnnnnnnnnnnnnnnnnnnnnnnnnnnnnnnnnnnnnnnnnnnnnnnnnnnnnnnnnnnnnnnnnnnnnnnnnnnnnnnnnnnnnnnnnnnnnnnnnnnnnnnnnnnnnnnnnnnnnnnnnnnnnnnnnnnnnnnnnnnnnnnnnnnnnnnnnnnnnnnnnnnnnnnnnnnnnnnnnnnnnnnnnnnnnnnnnnnnnnnnnnnnnnnnnnnnnnnnnnnnnnnnnnnnnnnnnnnnnnnnnnnnnnnnnnnnnnnnnnnnnnnnnnnnnnnnnnnnnnnnnnnnnnnnnnnnnnnnnnnnnnnnnnnnnnnnnnnnnnnnnnnnnnnnnnnnnnnnnnnnnnnnnnnnnnnnnnnnnnnnnnnnnnnnnnnnnnnnnnnnnnnnnnnnnnnnnnnnnnnnnnnnnnnnnnnnnnnnnnnnnnnnnnnnnnnnnnnnnnnnnnnnnnnnnnnnnnnnnnnnnnnnnnnnnnnnnnnnnnnnnnnnnnnnnnnnnnnnnnnnnnnnnnnnnnnnnnnnnnnnnnnnnnnnnnnnnnnnnnnnnnnnnnnnnnnnnnnnnnnnnnnnnnnnnnnnnnnnnnnnnnnnnnnnnnnnnnnnnnnnnnnnnnnnnnnnnnnnnnnnnnnnnnnnnnnnnnnnnnnnnnnnnnnnnnnnnnnnnnnnnnnnnnnnnnnnnnnnnnnnnnnnnnnnnnnnnnnnnnnnnnnnnnnnnnnnnnnnnnnnnnnnnnnnnnnnnnnnnnnnnnnnnnnnnnnnnnnnnnnnnnnnnnnnnnnnnnnnnnnnnnnnnnnnnnnnnnnnnnnnnnnnnnnnnnnnnnnnnnnnnnnnnnnnnnnnnnnnnnnnnnnnnnnnnnnnnnnnnnnnnnnnnnnnnnnnnnnnnnnnnnnnnnnnnnnnnnnnnnnnnnnnnnnnnnnnnnnnnnnnnnnnnnnnnnnnnnnnnnnnnnnnnnnnnnnnnnnnnnnnnnnnnnnnnnnnnnnnnnnnnnnnnnnnnnnnnnnnnnnnnnnnnnnnnnnnnnnnnnnnnnnnnnnnnnnnnnnnnnnnnnnnnnnnnnnnnnnnnnnnnnnnnnnnnnnnnnnnnnnnnnnnnnnnnnnnnnnnnnnnnnnnnnnnnnnnnnnnnnnnnnnnnnnnnnnnnnnnnnnnnnnnnnnnnnnnnnnnnnnnnnnnnnnnnnnnnnnnnnnnnnnnnnnnnnnnnnnnnnnnnnnnnnnnnnnnnnnnnnnnnnnnnnnnnnnnnnnnnnnnnnnnnnnnnnnnnnnnnnnnnnnnnnnnnnnnnnnnnnnnnnnnnnnnnnnnnnnnnnnnnnnnnnnnnnnnnnnnnnnnnnnnnnnnnnnnnnnnnnnnnnnnnnnnnnnnnnnnnnnnnnnnnnnnnnnnnnnnnnnnnnnnnnnnnnnnnnnnnnnnnnnnnnnnnnnnnnnnnnnnnnnnnnnnnnnnnnnnnnnnnnnnnnnnnnnnnnnnnnnnnnnnnnnnnnnnnnnnnnnnnnnnnnnnnnnnnnnnnnnnnnnnnnnnnnnnnnnnnnnnnnnnnnnnnnnnnnnnnnnnnnnnnnnnnnnnnnnnnnnnnnnnnnnnnnnnnnnnnnnnnnnnnnnnnnnnnnnnnnnnnnnnnnnnnnnnnnnnnnnnnnnnnnnnnnnnnnnnnnnnnnnnnnnnnnnnnnnnnnnnnnnnnnnnnnnnnnnnnnnnnnnnnnnnnnnnnnnnnnnnnnnnnnnnnnnnnnnnnnnnnnnnnnnnnnnnnnnnnnnnnnnnnnnnnnnnnnnnnnnnnnnnnnnnnnnnnnnnnnnnnnnnnnnnnnnnnnnnnnnnnnnnnnnnnnnnnnnnnnnnnnnnnnnnnnnnnnnnnnnnnnnnnnnnnnnnnnnnnnnnnnnnnnnnnnnnnnnnnnnnnnnnnnnnnnnnnnnnnnnnnnnnnnnnnnnnnnnnnnnnnnnnnnnnnnnnnnnnnnnnnnnnnnnnnnnnnnnnnnnnnnnnnnnnnnnnnnnnnnnnnnnnnnnnnnnnnnnnnnnnnnnnnnnnnnnnnnnnnnnnnnnnnnnnnnnnnnnnnnnnnnnnnnnnnnnnnnnnnnnnnnnnnnnnnnnnnnnnnnnnnnnnnnnnnnnnnnnnnnnnnnnnnnnnnnnnnnnnnnnnnnnnnnnnnnnnnnnnnnnnnnnnnnnnnnnnnnnnnnnnnnnnnnnnnnnnnnnnnnnnnnnnnnnnnnnnnnnnnnnnnnnnnnnnnnnnnnnnnnnnnnnnnnnnnnnnnnnnnnnnnnnnnnnnnnnnnnnnnnnnnnnnnnnnnnnnnnnnnnnnnnnnnnnnnnnnnnnnnnnnnnnnnnnnnnnnnnnnnnnnnnnnnnnnnnnnnnnnnnnnnnnnnnnnnnnnnnnnnnnnnnnnnnnnnnnnnnnnnnnnnnnnnnnnnnnnnnnnnnnnnnnnnnnnnnnnnnnnnnnnnnnnnnnnnnnnnnnnnnnnnnnnnnnnnnnnnnnnnnnnnnnnnnnnnnnnnnnnnnnnnnnnnnnnnnnnnnnnnnnnnnnnnnnnnnnnnnnnnnnnnnnnnnnnnnnnnnnnnnnnnnnnnnnnnnnnnnnnnnnnnnnnnnnnnnnnnnnnnnnnnnnnnnnnnnnnnnnnnnnnnnnnnnnnnnnnnnnnnnnnnnnnnnnnnnnnnnnnnnnnnnnnnnnnnnnnnnnnnnnnnnnnnnnnnnnnnnnnnnnnnnnnnnnnnnnnnnnnnnnnnnnnnnnnnnnnnnnnnnnnnnnnnnnnnnnnnnnnnnnnnnnnnnnnnnnnnnnnnnnnnnnnnnnnnnnnnnnnnnnnnnnnnnnnnnnnnnnnnnnnnnnnnnnnnnnnnnnnnnnnnnnnnnnnnnnnnnnnnnnnnnnnnnnnnnnnnnnnnnnnnnnnnnnnnnnnnnnnnnnnnnnnnnnnnnnnnnnnnnnnnnnnnnnnnnnnnnnnnnnnnnnnnnnnnnnnnnnnnnnnnnnnnnnnnnnnnnnnnnnnnnnnnnnnnnnnnnnnnnnnnnnnnnnnnnnnnnnnnnnnnnnnnnnnnnnnnnnnnnnnnnnnnnnnnnnnnnnnnnnnnnnnnnnnnnnnnnnnnnnnnnnnnnnnnnnnnnnnnnnnnnnnnnnnnnnnnnnnnnnnnnnnnnnnnnnnnnnnnnnnnnnnnnnnnnnnnnnnnnnnnnnnnnnnnnnnnnnnnnnnnnnnnnnnnnnnnnnnnnnnnnnnnnnnnnnnnnnnnnnnnnnnnnnnnnnnnnnnnnnnnnnnnnnnnnnnnnnnnnnnnnnnnnnnnnnnnnnnnnnnnnnnnnnnnnnnnnnnnnnnnnnnnnnnnnnnnnnnnnnnnnnnnnnnnnnnnnnnnnnnnnnnnnnnnnnnnnnnnnnnnnnnnnnnnnnnnnnnnnnnnnnnnnnnnnnnnnnnnnnnnnnnnnnnnnnnnnnnnnnnnnnnnnnnnnnnnnnnnnnnnnnnnnnnnnnnnnnnnnnnnnnnnnnnnnnnnnnnnnnnnnnnnnnnnnnnnnnnnnnnnnnnnnnnnnnnnnnnnnnnnnnnnnnnnnnnnnnnnnnnnnnnnnnnnnnnnnnnnnnnnnnnnnnnnnnnnnnnnnnnnnnnnnnnnnnnnnnnnnnnnnnnnnnnnnnnnnnnnnnnnnnnnnnnnnnnnnnnnnnnnnnnnnnnnnnnnnnnnnnnnnnnnnnnnnnnnnnnnnnnnnnnnnnnnnnnnnnnnnnnnnnnnnnnnnnnnnnnnnnnnnnnnnnnnnnnnnnnnnnnnnnnnnnnnnnnnnnnnnnnnnnnnnnnnnnnnnnnnnnnnnnnnnnnnnnnnnnnnnnnnnnnnnnnnnnnnnnnnnnnnnnnnnnnnnnnnnnnnnnnnnnnnnnnnnnnnnnnnnnnnnnnnnnnnnnnnnnnnnnnnnnnnnnnnnnnnnnnnnnnnnnnnnnnnnnnnnnnnnnnnnnnnnnnnnnnnnnnnnnnnnnnnnnnnnnnnnnnnnnnnnnnnnnnnnnnnnnnnnnnnnnnnnnnnnnnnnnnnnnnnnnnnnnnnnnnnnnnnnnnnnnnnnnnnnnnnnnnnnnnnnnnnnnnnnnnnnnnnnnnnnnnnnnnnnnnnnnnnnnnnnnnnnnnnnnnnnnnnnnnnnnnnnnnnnnnnnnnnnnnnnnnnnnnnnnnnnnnnnnnnnnnnnnnnnnnnnnnnnnnnnnnnnnnnnnnnnnnnnnnnnnnnnnnnnnnnnnnnnnnnnnnnnnnnnnnnnnnnnnnnnnnnnnnnnnnnnnnnnnnnnnnnnnnnnnnnnnnnnnnnnnnnnnnnnnnnnnnnnnnnnnnnnnnnnnnnnnnnnnnnnnnnnnnnnnnnnnnnnnnnnnnnnnnnnnnnnnnnnnnnnnnnnnnnnnnnnnnnnnnnnnnnnnnnnnnnnnnnnnnnnnnnnnnnnnnnnnnnnnnnnnnnnnnnnnnnnnnnnnnnnnnnnnnnnnnnnnnnnnnnnnnnnnnnnnnnnnnnnnnnnnnnnnnnnnnnnnnnnnnnnnnnnnnnnnnnnnnnnnnnnnnnnnnnnnnnnnnnnnnnnnnnnnnnnnnnnnnnnnnnnnnnnnnnnnnnnnnnnnnnnnnnnnnnnnnnnnnnnnnnnnnnnnnnnnnnnnnnnnnnnnnnnnnnnnnnnnnnnnnnnnnnnnnnnnnnnnnnnnnnnnnnnnnnnnnnnnnnnnnnnnnnnnnnnnnnnnnnnnnnnnnnnnnnnnnnnnnnnnnnnnnnnnnnnnnnnnnnnnnnnnnnnnnnnnnnnnnnnnnnnnnnnnnnnnnnnnnnnnnnnnnnnnnnnnnnnnnnnnnnnnnnnnnnnnnnnnnnnnnnnnnnnnnnnnnnnnnnnnnnnnnnnnnnnnnnnnnnnnnnnnnnnnnnnnnnnnnnnnnnnnnnnnnnnnnnnnnnnnnnnnnnnnnnnnnnnnnnnnnnnnnnnnnnnnnnnnnnnnnnnnnnnnnnnnnnnnnnnnnnnnnnnnnnnnnnnnnnnnnnnnnnnnnnnnnnnnnnnnnnnnnnnnnnnnnnnnnnnnnnnnnnnnnnnnnnnnnnnnnnnnnnnnnnnnnnnnnnnnnnnnnnnnnnnnnnnnnnnnnnnnnnnnnnnnnnnnnnnnnnnnnnnnnnnnnnnnnnnnnnnnnnnnnnnnnnnnnnnnnnnnnnnnnnnnnnnnnnnnnnnnnnnnnnnnnnnnnnnnnnnnnnnnnnnnnnnnnnnnnnnnnnnnnnnnnnnnnnnnnnnnnnnnnnnnnnnnnnnnnnnnnnnnnnnnnnnnnnnnnnnnnnnnnnnnnnnnnnnnnnnnnnnnnnnnnnnnnnnnnnnnnnnnnnnnnnnnnnnnnnnnnnnnnnnnnnnnnnnnnnnnnnnnnnnnnnnnnnnnnnnnnnnnnnnnnnnnnnnnnnnnnnnnnnnnnnnnnnnnnnnnnnnnnnnnnnnnnnnnnnnnnnnnnnnnnnnnnnnnnnnnnnnnnnnnnnnnnnnnnnnnnnnnnnnnnnnnnnnnnnnnnnnnnnnnnnnnnnnnnnnnnnnnnnnnnnnnnnnnnnnnnnnnnnnnnnnnnnnnnnnnnnnnnnnnnnnnnnnnnnnnnnnnnnnnnnnnnnnnnnnnnnnnnnnnnnnnnnnnnnnnnnnnnnnnnnnnnnnnnnnnnnnnnnnnnnnnnnnnnnnnnnnnnnnnnnnnnnnnnnnnnnnnnnnnnnnnnnnnnnnnnnnnnnnnnnnnnnnnnnnnnnnnnnnnnnnnnnnnnnnnnnnnnnnnnnnnnnnnnnnnnnnnnnnnnnnnnnnnnnnnnnnnnnnnnnnnnnnnnnnnnnnnnnnnnnnnnnnnnnnnnnnnnnnnnnnnnnnnnnnnnnnnnnnnnnnnnnnnnnnnnnnnnnnnnnnnnnnnnnnnnnnnnnnnnnnnnnnnnnnnnnnnnnnnnnnnnnnnnnnnnnnnnnnnnnnnnnnnnnnnnnnnnnnnnnnnnnnnnnnnnnnnnnnnnnnnnnnnnnnnnnnnnnnnnnnnnnnnnnnnnnnnnnnnnnnnnnnnnnnnnnnnnnnnnnnnnnnnnnnnnnnnnnnnnnnnnnnnnnnnnnnnnnnnnnnnnnnnnnnnnnnnnnnnnnnnnnnnnnnnnnnnnnnnnnnnnnnnnnnnnnnnnnnnnnnnnnnnnnnnnnnnnnnnnnnnnnnnnnnnnnnnnnnnnnnnnnnnnnnnnnnnnnnnnnnnnnnnnnnnnnnnnnnnnnnnnnnnnnnnnnnnnnnnnnnnnnnnnnnnnnnnnnnnnnnnnnnnnnnnnnnnnnnnnnnnnnnnnnnnnnnnnnnnnnnnnnnnnnnnnnnnnnnnnnnnnnnnnnnnnnnnnnnnnnnnnnnnnnnnnnnnnnnnnnnnnnnnnnnnnnnnnnnnnnnnnnnnnnnnnnnnnnnnnnnnnnnnnnnnnnnnnnnnnnnnnnnnnnnnnnnnnnnnnnnnnnnnnnnnnnnnnnnnnnnnnnnnnnnnnnnnnnnnnnnnnnnnnnnnnnnnnnnnnnnnnnnnnnnnnnnnnnnnnnnnnnnnnnnnnnnnnnnnnnnnnnnnnnnnnnnnnnnnnnnnnnnnnnnnnnnnnnnnnnnnnnnnnnnnnnnnnnnnnnnnnnnnnnnnnnnnnnnnnnnnnnnnnnnnnnnnnnnnnnnnnnnnnnnnnnnnnnnnnnnnnnnnnnnnnnnnnnnnnnnnnnnnnnnnnnnnnnnnnnnnnnnnnnnnnnnnnnnnnnnnnnnnnnnnnnnnnnnnnnnnnnnnnnnnnnnnnnnnnnnnnnnnnnnnnnnnnnnnnnnnnnnnnnnnnnnnnnnnnnnnnnnnnnnnnnnnnnnnnnnnnnnnnnnnnnnnnnnnnnnnnnnnnnnnnnnnnnnnnnnnnnnnnnnnnnnnnnnnnnnnnnnnnnnnnnnnnnnnnnnnnnnnnnnnnnnnnnnnnnnnnnnnnnnnnnnnnnnnnnnnnnnnnnnnnnnnnnnnnnnnnnnnnnnnnnnnnnnnnnnnnnnnnnnnnnnnnnnnnnnnnnnnnnnnnnnnnnnnnnnnnnnnnnnnnnnnnnnnnnnnnnnnnnnnnnnnnnnnnnnnnnnnnnnnnnnnnnnnnnnnnnnnnnnnnnnnnnnnnnnnnnnnnnnnnnnnnnnnnnnnnnnnnnnnnnnnnnnnnnnnnnnnnnnnnnnnnnnnnnnnnnnnnnnnnnnnnnnnnnnnnnnnnnnnnnnnnnnnnnnnnnnnnnnnnnnnnnnnnnnnnnnnnnnnnnnnnnnnnnnnnnnnnnnnnnnnnnnnnnnnnnnnnnnnnnnnnnnnnnnnnnnnnnnnnnnnnnnnnnnnnnnnnnnnnnnnnnnnnnnnnnnnnnnnnnnnnnnnnnnnnnnnnnnnnnnnnnnnnnnnnnnnnnnnnnnnnnnnnnnnnnnnnnnnnnnnnnnnnnnnnnnnnnnnnnnnnnnnnnnnnnnnnnnnnnnnnnnnnnnnnnnnnnnnnnnnnnnnnnnnnnnnnnnnnnnnnnnnnnnnnnnnnnnnnnnnnnnnnnnnnnnnnnnnnnnnnnnnnnnnnnnnnnnnnnnnnnnnnnnnnnnnnnnnnnnnnnnnnnnnnnnnnnnnnnnnnnnnnnnnnnnnnnnnnnnnnnnnnnnnnnnnnnnnnnnnnnnnnnnnnnnnnnnnnnnnnnnnnnnnnnnnnnnnnnnnnnnnnnnnnnnnnnnnnnnnnnnnnnnnnnnnnnnnnnnnnnnnnnnnnnnnnnnnnnnnnnnnnnnnnnnnnnnnnnnnnnnnnnnnnnnnnnnnnnnnnnnnnnnnnnnnnnnnnnnnnnnnnnnnnnnnnnnnnnnnnnnnnnnnnnnnnnnnnnnnnnnnnnnnnnnnnnnnnnnnnnnnnnnnnnnnnnnnnnnnnnnnnnnnnnnnnnnnnnnnnnnnnnnnnnnnnnnnnnnnnnnnnnnnnnnnnnnnnnnnnnnnnnnnnnnnnnnnnnnnnnnnnnnnnnnnnnnnnnnnnnnnnnnnnnnnnnnnnnnnnnnnnnnnnnnnnnnnnnnnnnnnnnnnnnnnnnnnnnnnnnnnnnnnnnnnnnnnnnnnnnnnnnnnnnnnnnnnnnnnnnnnnnnnnnnnnnnnnnnnnnnnnnnnnnnnnnnnnnnnnnnnnnnnnnnnnnnnnnnnnnnnnnnnnnnnnnnnnnnnnnnnnnnnnnnnnnnnnnnnnnnnnnnnnnnnnnnnnnnnnnnnnnnnnnnnnnnnnnnnnnnnnnnnnnnnnnnnnnnnnnnnnnnnnnnnnnnnnnnnnnnnnnnnnnnnnnnnnnnnnnnnnnnnnnnnnnnnnnnnnnnnnnnnnnnnnnnnnnnnnnnnnnnnnnnnnnnnnnnnnnnnnnnnnnnnnnnnnnnnnnnnnnnnnnnnnnnnnnnnnnnnnnnnnnnnnnnnnnnnnnnnnnnnnnnnnnnnnnnnnnnnnnnnnnnnnnnnnnnnnnnnnnnnnnnnnnnnnnnnnnnnnnnnnnnnnnnnnnnnnnnnnnnnnnnnnnnnnnnnnnnnnnnnnnnnnnnnnnnnnnnnnnnnnnnnnnnnnnnnnnnnnnnnnnnnnnnnnnnnnnnnnnnnnnnnnnnnnnnnnnnnnnnnnnnnnnnnnnnnnnnnnnnnnnnnnnnnnnnnnnnnnnnnnnnnnnnnnnnnnnnnnnnnnnnnnnnnnnnnnnnnnnnnnnnnnnnnnnnnnnnnnnnnnnnnnnnnnnnnnnnnnnnnnnnnnnnnnnnnnnnnnnnnnnnnnnnnnnnnnnnnnnnnnnnnnnnnnnnnnnnnnnnnnnnnnnnnnnnnnnnnnnnnnnnnnnnnnnnnnnnnnnnnnnnnnnnnnnnnnnnnnnnnnnnnnnnnnnnnnnnnnnnnnnnnnnnnnnnnnnnnnnnnnnnnnnnnnnnnnnnnnnnnnnnnnnnnnnnnnnnnnnnnnnnnnnnnnnnnnnnnnnnnnnnnnnnnnnnnnnnnnnnnnnnnnnnnnnnnnnnnnnnnnnnnnnnnnnnnnnnnnnnnnnnnnnnnnnnnnnnnnnnnnnnnnnnnnnnnnnnnnnnnnnnnnnnnnnnnnnnnnnnnnnnnnnnnnnnnnnnnnnnnnnnnnnnnnnnnnnnnnnnnnnnnnnnnnnnnnnnnnnnnnnnnnnnnnnnnnnnnnnnnnnnnnnnnnnnnnnnnnnnnnnnnnnnnnnnnnnnnnnnnnnnnnnnnnnnnnnnnnnnnnnnnnnnnnnnnnnnnnnnnnnnnnnnnnnnnnnnnnnnnnnnnnnnnnnnnnnnnnnnnnnnnnnnnnnnnnnnnnnnnnnnnnnnnnnnnnnnnnnnnnnnnnnnnnnnnnnnnnnnnnnnnnnnnnnnnnnnnnnnnnnnnnnnnnnnnnnnnnnnnnnnnnnnnnnnnnnnnnnnnnnnnnnnnnnnnnnnnnnnnnnnnnnnnnnnnnnnnnnnnnnnnnnnnnnnnnnnnnnnnnnnnnnnnnnnnnnnnnnnnnnnnnnnnnnnnnnnnnnnnnnnnnnnnnnnnnnnnnnnnnnnnnnnnnnnnnnnnnnnnnnnnnnnnnnnnnnnnnnnnnnnnnnnnnnnnnnnnnnnnnnnnnnnnnnnnnnnnnnnnnnnnnnnnnnnnnnnnnnnnnnnnnnnnnnnnnnnnnnnnnnnnnnnnnnnnnnnnnnnnnnnnnnnnnnnnnnnnnnnnnnnnnnnnnnnnnnnnnnnnnnnnnnnnnnnnnnnnnnnnnnnnnnnnnnnnnnnnnnnnnnnnnnnnnnnnnnnnnnnnnnnnnnnnnnnnnnnnnnnnnnnnnnnnnnnnnnnnnnnnnnnnnnnnnnnnnnnnnnnnnnnnnnnnnnnnnnnnnnnnnnnnnnnnnnnnnnnnnnnnnnnnnnnnnnnnnnnnnnnnnnnnnnnnnnnnnnnnnnnnnnnnnnnnnnnnnnnnnnnnnnnnnnnnnnnnnnnnnnnnnnnnnnnnnnnnnnnnnnnnnnnnnnnnnnnnnnnnnnnnnnnnnnnnnnnnnnnnnnnnnnnnnnnnnnnnnnnnnnnnnnnnnnnnnnnnnnnnnnnnnnnnnnnnnnnnnnnnnnnnnnnnnnnnnnnnnnnnnnnnnnnnnnnnnnnnnnnnnnnnnnnnnnnnnnnnnnnnnnnnnnnnnnnnnnnnnnnnnnnnnnnnnnnnnnnnnnnnnnnnnnnnnnnnnnnnnnnnnnnnnnnnnnnnnnnnnnnnnnnnnnnnnnnnnnnnnnnnnnnnnnnnnnnnnnnnnnnnnnnnnnnnnnnnnnnnnnnnnnnnnnnnnnnnnnnnnnnnnnnnnnnnnnnnnnnnnnnnnnnnnnnnnnnnnnnnnnnnnnnnnnnnnnnnnnnnnnnnnnnnnnnnnnnnnnnnnnnnnnnnnnnnnnnnnnnnnnnnnnnnnnnnnnnnnnnnnnnnnnnnnnnnnnnnnnnnnnnnnnnnnnnnnnnnnnnnnnnnnnnnnnnnnnnnnnnnnnnnnnnnnnnnnnnnnnnnnnnnnnnnnnnnnnnnnnnnnnnnnnnnnnnnnnnnnnnnnnnnnnnnnnnnnnnnnnnnnnnnnnnnnnnnnnnnnnnnnnnnnnnnnnnnnnnnnnnnnnnnnnnnnnnnnnnnnnnnnnnnnnnnnnnnnnnnnnnnnnnnnnnnnnnnnnnnnnnnnnnnnnnnnnnnnnnnnnnnnnnnnnnnnnnnnnnnnnnnnnnnnnnnnnnnnnnnnnnnnnnnnnnnnnnnnnnnnnnnnnnnnnnnnnnnnnnnnnnnnnnnnnnnnnnnnnnnnnnnnnnnnnnnnnnnnnnnnnnnnnnnnnnnnnnnnnnnnnnnnnnnnnnnnnnnnnnnnnnnnnnnnnnnnnnnnnnnnnnnnnnnnnnnnnnnnnnnnnnnnnnnnnnnnnnnnnnnnnnnnnnnnnnnnnnnnnnnnnnnnnnnnnnnnnnnnnnnnnnnnnnnnnnnnnnnnnnnnnnnnnnnnnnnnnnnnnnnnnnnnnnnnnnnnnnnnnnnnnnnnnnnnnnnnnnnnnnnnnnnnnnnnnnnnnnnnnnnnnnnnnnnnnnnnnnnnnnnnnnnnnnnnnnnnnnnnnnnnnnnnnnnnnnnnnnnnnnnnnnnnnnnnnnnnnnnnnnnnnnnnnnnnnnnnnnnnnnnnnnnnnnnnnnnnnnnnnnnnnnnnnnnnnnnnnnnnnnnnnnnnnnnnnnnnnnnnnnnnnnnnnnnnnnnnnnnnnnnnnnnnnnnnnnnnnnnnnnnnnnnnnnnnnnnnnnnnnnnnnnnnnnnnnnnnnnnnnnnnnnnnnnnnnnnnnnnnnnnnnnnnnnnnnnnnnnnnnnnnnnnnnnnnnnnnnnnnnnnnnnnnnnnnnnnnnnnnnnnnnnnnnnnnnnnnnnnnnnnnnnnnnnnnnnnnnnnnnnnnnnnnnnnnnnnnnnnnnnnnnnnnnnnnnnnnnnnnnnnnnnnnnnnnnnnnnnnnnnnnnnnnnnnnnnnnnnnnnnnnnnnnnnnnnnnnnnnnnnnnnnnnnnnnnnnnnnnnnnnnnnnnnnnnnnnnnnnnnnnnnnnnnnnnnnnnnnnnnnnnnnnnnnnnnnnnnnnnnnnnnnnnnnnnnnnnnnnnnnnnnnnnnnnnnnnnnnnnnnnnnnnnnnnnnnnnnnnnnnnnnnnnnnnnnnnnnnnnnnnnnnnnnnnnnnnnnnnnnnnnnnnnnnnnnnnnnnnnnnnnnnnnnnnnnnnnnnnnnnnnnnnnnnnnnnnnnnnnnnnnnnnnnnnnnnnnnnnnnnnnnnnnnnnnnnnnnnnnnnnnnnnnnnnnnnnnnnnnnnnnnnnnnnnnnnnnnnnnnnnnnnnnnnnnnnnnnnnnnnnnnnnnnnnnnnnnnnnnnnnnnnnnnnnnnnnnnnnnnnnnnnnnnnnnnnnnnnnnnnnnnnnnnnnnnnnnnnnnnnnnnnnnnnnnnnnnnnnnnnnnnnnnnnnnnnnnnnnnnnnnnnnnnnnnnnnnnnnnnnnnnnnnnnnnnnnnnnnnnnnnnnnnnnnnnnnnnnnnnnnnnnnnnnnnnnnnnnnnnnnnnnnnnnnnnnnnnnnnnnnnnnnnnnnnnnnnnnnnnnnnnnnnnnnnnnnnnnnnnnnnnnnnnnnnnnnnnnnnnnnnnnnnnnnnnnnnnnnnnnnnnnnnnnnnnnnnnnnnnnnnnnnnnnnnnnnnnnnnnnnnnnnnnnnnnnnnnnnnnnnnnnnnnnnnnnnnnnnnnnnnnnnnnnnnnnnnnnnnnnnnnnnnnnnnnnnnnnnnnnnnnnnnnnnnnnnnnnnnnnnnnnnnnnnnnnnnnnnnnnnnnnnnnnnnnnnnnnnnnnnnnnnnnnnnnnnnnnnnnnnnnnnnnnnnnnnnnnnnnnnnnnnnnnnnnnnnnnnnnnnnnnnnnnnnnnnnnnnnnnnnnnnnnnnnnnnnnnnnnnnnnnnnnnnnnnnnnnnnnnnnnnnnnnnnnnnnnnnnnnnnnnnnnnnnnnnnnnnnnnnnnnnnnnnnnnnnnnnnnnnnnnnnnnnnnnnnnnnnnnnnnnnnnnnnnnnnnnnnnnnnnnnnnnnnnnnnnnnnnnnnnnnnnnnnnnnnnnnnnnnnnnnnnnnnnnnnnnnnnnnnnnnnnnnnnnnnnnnnnnnnnnnnnnnnnnnnnnnnnnnnnnnnnnnnnnnnnnnnnnnnnnnnnnnnnnnnnnnnnnnnnnnnnnnnnnnnnnnnnnnnnnnnnnnnnnnnnnnnnnnnnnnnnnnnnnnnnnnnnnnnnnnnnnnnnnnnnnnnnnnnnnnnnnnnnnnnnnnnnnnnnnnnnnnnnnnnnnnnnnnnnnnnnnnnnnnnnnnnnnnnnnnnnnnnnnnnnnnnnnnnnnnnnnnnnnnnnnnnnnnnnnnnnnnnnnnnnnnnnnnnnnnnnnnnnnnnnnnnnnnnnnnnnnnnnnnnnnnnnnnnnnnnnnnnnnnnnnnnnnnnnnnnnnnnnnnnnnnnnnnnnnnnnnnnnnnnnnnnnnnnnnnnnnnnnnnnnnnnnnnnnnnnnnnnnnnnnnnnnnnnnnnnnnnnnnnnnnnnnnnnnnnnnnnnnnnnnnnnnnnnnnnnnnnnnnnnnnnnnnnnnnnnnnnnnnnnnnnnnnnnnnnnnnnnnnnnnnnnnnnnnnnnnnnnnnnnnnnnnnnnnnnnnnnnnnnnnnnnnnnnnnnnnnnnnnnnnnnnnnnnnnnnnnnnnnnnnnnnnnnnnnnnnnnnnnnnnnnnnnnnnnnnnnnnnnnnnnnnnnnnnnnnnnnnnnnnnnnnnnnnnnnnnnnnnnnnnnnnnnnnnnnnnnnnnnnnnnnnnnnnnnnnnnnnnnnnnnnnnnnnnnnnnnnnnnnnnnnnnnnnnnnnnnnnnnnnnnnnnnnnnnnnnnnnnnnnnnnnnnnnnnnnnnnnnnnnnnnnnnnnnnnnnnnnnnnnnnnnnnnnnnnnnnnnnnnnnnnnnnnnnnnnnnnnnnnnnnnnnnnnnnnnnnnnnnnnnnnnnnnnnnnnnnnnnnnnnnnnnnnnnnnnnnnnnnnnnnnnnnnnnnnnnnnnnnnnnnnnnnnnnnnnnnnnnnnnnnnnnnnnnnnnnnnnnnnnnnnnnnnnnnnnnnnnnnnnnnnnnnnnnnnnnnnnnnnnnnnnnnnnnnnnnnnnnnnnnnnnnnnnnnnnnnnnnnnnnnnnnnnnnnnnnnnnnnnnnnnnnnnnnnnnnnnnnnnnnnnnnnnnnnnnnnnnnnnnnnnnnnnnnnnnnnnnnnnnnnnnnnnnnnnnnnnnnnnnnnnnnnnnnnnnnnnnnnnnnnnnnnnnnnnnnnnnnnnnnnnnnnnnnnnnnnnnnnnnnnnnnnnnnnnnnnnnnnnnnnnnnnnnnnnnnnnnnnnnnnnnnnnnnnnnnnnnnnnnnnnnnnnnnnnnnnnnnnnnnnnnnnnnnnnnnnnnnnnnnnnnnnnnnnnnnnnnnnnnnnnnnnnnnnnnnnnnnnnnnnnnnnnnnnnnnnnnnnnnnnnnnnnnnnnnnnnnnnnnnnnnnnnnnnnnnnnnnnnnnnnnnnnnnnnnnnnnnnnnnnnnnnnnnnnnnnnnnnnnnnnnnnnnnnnnnnnnnnnnnnnnnnnnnnnnnnnnnnnnnnnnnnnnnnnnnnnnnnnnnnnnnnnnnnnnnnnnnnnnnnnnnnnnnnnnnnnnnnnnnnnnnnnnnnnnnnnnnnnnnnnnnnnnnnnnnnnnnnnnnnnnnnnnnnnnnnnnnnnnnnnnnnnnnnnnnnnnnnnnnnnnnnnnnnnnnnnnnnnnnnnnnnnnnnnnnnnnnnnnnnnnnnnnnnnnnnnnnnnnnnnnnnnnnnnnnnnnnnnnnnnnnnnnnnnnnnnnnnnnnnnnnnnnnnnnnnnnnnnnnnnnnnnnnnnnnnnnnnnnnnnnnnnnnnnnnnnnnnnnnnnnnnnnnnnnnnnnnnnnnnnnnnnnnnnnnnnnnnnnnnnnnnnnnnnnnnnnnnnnnnnnnnnnnnnnnnnnnnnnnnnnnnnnnnnnnnnnnnnnnnnnnnnnnnnnnnnnnnnnnnnnnnnnnnnnnnnnnnnnnnnnnnnnnnnnnnnnnnnnnnnnnnnnnnnnnnnnnnnnnnnnnnnnnnnnnnnnnnnnnnnnnnnnnnnnnnnnnnnnnnnnnnnnnnnnnnnnnnnnnnnnnnnnnnnnnnnnnnnnnnnnnnnnnnnnnnnnnnnnnnnnnnnnnnnnnnnnnnnnnnnnnnnnnnnnnnnnnnnnnnnnnnnnnnnnnnnnnnnnnnnnnnnnnnnnnnnnnnnnnnnnnnnnnnnnnnnnnnnnnnnnnnnnnnnnnnnnnnnnnnnnnnnnnnnnnnnnnnnnnnnnnnnnnnnnnnnnnnnnnnnnnnnnnnnnnnnnnnnnnnnnnnnnnnnnnnnnnnnnnnnnnnnnnnnnnnnnnnnnnnnnnnnnnnnnnnnnnnnnnnnnnnnnnnnnnnnnnnnnnnnnnnnnnnnnnnnnnnnnnnnnnnnnnnnnnnnnnnnnnnnnnnnnnnnnnnnnnnnnnnnnnnnnnnnnnnnnnnnnnnnnnnnnnnnnnnnnnnnnnnnnnnnnnnnnnnnnnnnnnnnnnnnnnnnnnnnnnnnnnnnnnnnnnnnnnnnnnnnnnnnnnnnnnnnnnnnnnnnnnnnnnnnnnnnnnnnnnnnnnnnnnnnnnnnnnnnnnnnnnnnnnnnnnnnnnnnnnnnnnnnnnnnnnnnnnnnnnnnnnnnnnnnnnnnnnnnnnnnnnnnnnnnnnnnnnnnnnnnnnnnnnnnnnnnnnnnnnnnnnnnnnnnnnnnnnnnnnnnnnnnnnnnnnnnnnnnnnnnnnnnnnnnnnnnnnnnnnnnnnnnnnnnnnnnnnnnnnnnnnnnnnnnnnnnnnnnnnnnnnnnnnnnnnnnnnnnnnnnnnnnnnnnnnnnnnnnnnnnnnnnnnnnnnnnnnnnnnnnnnnnnnnnnnnnnnnnnnnnnnnnnnnnnnnnnnnnnnnnnnnnnnnnnnnnnnnnnnnnnnnnnnnnnnnnnnnnnnnnnnnnnnnnnnnnnnnnnnnnnnnnnnnnnnnnnnnnnnnnnnnnnnnnnnnnnnnnnnnnnnnnnnnnnnnnnnnnnnnnnnnnnnnnnnnnnnnnnnnnnnnnnnnnnnnnnnnnnnnnnnnnnnnnnnnnnnnnnnnnnnnnnnnnnnnnnnnnnnnnnnnnnnnnnnnnnnnnnnnnnnnnnnnnnnnnnnnnnnnnnnnnnnnnnnnnnnnnnnnnnnnnnnnnnnnnnnnnnnnnnnnnnnnnnnnnnnnnnnnnnnnnnnnnnnnnnnnnnnnnnnnnnnnnnnnnnnnnnnnnnnnnnnnnnnnnnnnnnnnnnnnnnnnnnnnnnnnnnnnnnnnnnnnnnnnnnnnnnnnnnnnnnnnnnnnnnnnnnnnnnnnnnnnnnnnnnnnnnnnnnnnnnnnnnnnnnnnnnnnnnnnnnnnnnnnnnnnnnnnnnnnnnnnnnnnnnnnnnnnnnnnnnnnnnnnnnnnnnnnnnnnnnnnnnnnnnnnnnnnnnnnnnnnnnnnnnnnnnnnnnnnnnnnnnnnnnnnnnnnnnnnnnnnnnnnnnnnnnnnnnnnnnnnnnnnnnnnnnnnnnnnnnnnnnnnnnnnnnnnnnnnnnnnnnnnnnnnnnnnnnnnnnnnnnnnnnnnnnnnnnnnnnnnnnnnnnnnnnnnnnnnnnnnnnnnnnnnnnnnnnnnnnnnnnnnnnnnnnnnnnnnnnnnnnnnnnnnnnnnnnnnnnnnnnnnnnnnnnnnnnnnnnnnnnnnnnnnnnnnnnnnnnnnnnnnnnnnnnnnnnnnnnnnnnnnnnnnnnnnnnnnnnnnnnnnnnnnnnnnnnnnnnnnnnnnnnnnnnnnnnnnnnnnnnnnnnnnnnnnnnnnnnnnnnnnnnnnnnnnnnnnnnnnnnnnnnnnnnnnnnnnnnnnnnnnnnnnnnnnnnnnnnnnnnnnnnnnnnnnnnnnnnnnnnnnnnnnnnnnnnnnnnnnnnnnnnnnnnnnnnnnnnnnnnnnnnnnnnnnnnnnnnnnnnnnnnnnnnnnnnnnnnnnnnnnnnnnnnnnnnnnnnnnnnnnnnnnnnnnnnnnnnnnnnnnnnnnnnnnnnnnnnnnnnnnnnnnnnnnnnnnnnnnnnnnnnnnnnnnnnnnnnnnnnnnnnnnnnnnnnnnnnnnnnnnnnnnnnnnnnnnnnnnnnnnnnnnnnnnnnnnnnnnnnnnnnnnnnnnnnnnnnnnnnnnnnnnnnnnnnnnnnnnnnnnnnnnnnnnnnnnnnnnnnnnnnnnnnnnnnnnnnnnnnnnnnnnnnnnnnnnnnnnnnnnnnnnnnnnnnnnnnnnnnnnnnnnnnnnnnnnnnnnnnnnnnnnnnnnnnnnnnnnnnnnnnnnnnnnnnnnnnnnnnnnnnnnnnnnnnnnnnnnnnnnnnnnnnnnnnnnnnnnnnnnnnnnnnnnnnnnnnnnnnnnnnnnnnnnnnnnnnnnnnnnnnnnnnnnnnnnnnnnnnnnnnnnnnnnnnnnnnnnnnnnnnnnnnnnnnnnnnnnnnnnnnnnnnnnnnnnnnnnnnnnnnnnnnnnnnnnnnnnnnnnnnnnnnnnnnnnnnnnnnnnnnnnnnnnnnnnnnnnnnnnnnnnnnnnnnnnnnnnnnnnnnnnnnnnnnnnnnnnnnnnnnnnnnnnnnnnnnnnnnnnnnnnnnnnnnnnnnnnnnnnnnnnnnnnnnnnnnnnnnnnnnnnnnnnnnnnnnnnnnnnnnnnnnnnnnnnnnnnnnnnnnnnnnnnnnnnnnnnnnnnnnnnnnnnnnnnnnnnnnnnnnnnnnnnnnnnnnnnnnnnnnnnnnnnnnnnnnnnnnnnnnnnnnnnnnnnnnnnnnnnnnnnnnnnnnnnnnnnnnnnnnnnnnnnnnnnnnnnnnnnnnnnnnnnnnnnnnnnnnnnnnnnnnnnnnnnnnnnnnnnnnnnnnnnnnnnnnnnnnnnnnnnnnnnnnnnnnnnnnnnnnnnnnnnnnnnnnnnnnnnnnnnnnnnnnnnnnnnnnnnnnnnnnnnnnnnnnnnnnnnnnnnnnnnnnnnnnnnnnnnnnnnnnnnnnnnnnnnnnnnnnnnnnnnnnnnnnnnnnnnnnnnnnnnnnnnnnnnnnnnnnnnnnnnnnnnnnnnnnnnnnnnnnnnnnnnnnnnnnnnnnnnnnnnnnnnnnnnnnnnnnnnnnnnnnnnnnnnnnnnnnnnnnnnnnnnnnnnnnnnnnnnnnnnnnnnnnnnnnnnnnnnnnnnnnnnnnnnnnnnnnnnnnnnnnnnnnnnnnnnnnnnnnnnnnnnnnnnnnnnnnnnnnnnnnnnnnnnnnnnnnnnnnnnnnnnnnnnnnnnnnnnnnnnnnnnnnnnnnnnnnnnnnnnnnnnnnnnnnnnnnnnnnnnnnnnnnnnnnnnnnnnnnnnnnnnnnnnnnnnnnnnnnnnnnnnnnnnnnnnnnnnnnnnnnnnnnnnnnnnnnnnnnnnnnnnnnnnnnnnnnnnnnnnnnnnnnnnnnnnnnnnnnnnnnnnnnnnnnnnnnnnnnnnnnnnnnnnnnnnnnnnnnnnnnnnnnnnnnnnnnnnnnnnnnnnnnnnnnnnnnnnnnnnnnnnnnnnnnnnnnnnnnnnnnnnnnnnnnnnnnnnnnnnnnnnnnnnnnnnnnnnnnnnnnnnnnnnnnnnnnnnnnnnnnnnnnnnnnnnnnnnnnnnnnnnnnnnnnnnnnnnnnnnnnnnnnnnnnnnnnnnnnnnnnnnnnnnnnnnnnnnnnnnnnnnnnnnnnnnnnnnnnnnnnnnnnnnnnnnnnnnnnnnnnnnnnnnnnnnnnnnnnnnnnnnnnnnnnnnnnnnnnnnnnnnnnnnnnnnnnnnnnnnnnnnnnnnnnnnnnnnnnnnnnnnnnnnnnnnnnnnnnnnnnnnnnnnnnnnnnnnnnnnnnnnnnnnnnnnnnnnnnnnnnnnnnnnnnnnnnnnnnnnnnnnnnnnnnnnnnnnnnnnnnnnnnnnnnnnnnnnnnnnnnnnnnnnnnnnnnnnnnnnnnnnnnnnnnnnnnnnnnnnnnnnnnnnnnnnnnnnnnnnnnnnnnnnnnnnnnnnnnnnnnnnnnnnnnnnnnnnnnnnnnnnnnnnnnnnnnnnnnnnnnnnnnnnnnnnnnnnnnnnnnnnnnnnnnnnnnnnnnnnnnnnnnnnnnnnnnnnnnnnnnnnnnnnnnnnnnnnnnnnnnnnnnnnnnnnnnnnnnnnnnnnnnnnnnnnnnnnnnnnnnnnnnnnnnnnnnnnnnnnnnnnnnnnnnnnnnnnnnnnnnnnnnnnnnnnnnnnnnnnnnnnnnnnnnnnnnnnnnnnnnnnnnnnnnnnnnnnnnnnnnnnnnnnnnnnnnnnnnnnnnnnnnnnnnnnnnnnnnnnnnnnnnnnnnnnnnnnnnnnnnnnnnnnnnnnnnnnnnnnnnnnnnnnnnnnnnnnnnnnnnnnnnnnnnnnnnnnnnnnnnnnnnnnnnnnnnnnnnnnnnnnnnnnnnnnnnnnnnnnnnnnnnnnnnnnnnnnnnnnnnnnnnnnnnnnnnnnnnnnnnnnnnnnnnnnnnnnnnnnnnnnnnnnnnnnnnnnnnnnnnnnnnnnnnnnnnnnnnnnnnnnnnnnnnnnnnnnnnnnnnnnnnnnnnnnnnnnnnnnnnnnnnnnnnnnnnnnnnnnnnnnnnnnnnnnnnnnnnnnnnnnnnnnnnnnnnnnnnnnnnnnnnnnnnnnnnnnnnnnnnnnnnnnnnnnnnnnnnnnnnnnnnnnnnnnnnnnnnnnnnnnnnnnnnnnnnnnnnnnnnnnnnnnnnnnnnnnnnnnnnnnnnnnnnnnnnnnnnnnnnnnnnnnnnnnnnnnnnnnnnnnnnnnnnnnnnnnnnnnnnnnnnnnnnnnnnnnnnnnnnnnnnnnnnnnnnnnnnnnnnnnnnnnnnnnnnnnnnnnnnnnnnnnnnnnnnnnnnnnnnnnnnnnnnnnnnnnnnnnnnnnnnnnnnnnnnnnnnnnnnnnnnnnnnnnnnnnnnnnnnnnnnnnnnnnnnnnnnnnnnnnnnnnnnnnnnnnnnnnnnnnnnnnnnnnnnnnnnnnnnnnnnnnnnnnnnnnnnnnnnnnnnnnnnnnnnnnnnnnnnnnnnnnnnnnnnnnnnnnnnnnnnnnnnnnnnnnnnnnnnnnnnnnnnnnnnnnnnnnnnnnnnnnnnnnnnnnnnnnnnnnnnnnnnnnnnnnnnnnnnnnnnnnnnnnnnnnnnnnnnnnnnnnnnnnnnnnnnnnnnnnnnnnnnnnnnnnnnnnnnnnnnnnnnnnnnnnnnnnnnnnnnnnnnnnnnnnnnnnnnnnnnnnnnnnnnnnnnnnnnnnnnnnnnnnnnnnnnnnnnnnnnnnnnnnnnnnnnnnnnnnnnnnnnnnnnnnnnnnnnnnnnnnnnnnnnnnnnnnnnnnnnnnnnnnnnnnnnnnnnnnnnnnnnnnnnnnnnnnnnnnnnnnnnnnnnnnnnnnnnnnnnnnnnnnnnnnnnnnnnnnnnnnnnnnnnnnnnnnnnnnnnnnnnnnnnnnnnnnnnnnnnnnnnnnnnnnnnnnnnnnnnnnnnnnnnnnnnnnnnnnnnnnnnnnnnnnnnnnnnnnnnnnnnnnnnnnnnnnnnnnnnnnnnnnnnnnnnnnnnnnnnnnnnnnnnnnnnnnnnnnnnnnnnnnnnnnnnnnnnnnnnnnnnnnnnnnnnnnnnnnnnnnnnnnnnnnnnnnnnnnnnnnnnnnnnnnnnnnnnnnnnnnnnnnnnnnnnnnnnnnnnnnnnnnnnnnnnnnnnnnnnnnnnnnnnnnnnnnnnnnnnnnnnnnnnnnnnnnnnnnnnnnnnnnnnnnnnnnnnnnnnnnnnnnnnnnnnnnnnnnnnnnnnnnnnnnnnnnnnnnnnnnnnnnnnnnnnnnnnnnnnnnnnnnnnnnnnnnnnnnnnnnnnnnnnnnnnnnnnnnnnnnnnnnnnnnnnnnnnnnnnnnnnnnnnnnnnnnnnnnnnnnnnnnnnnnnnnnnnnnnnnnnnnnnnnnnnnnnnnnnnnnnnnnnnnnnnnnnnnnnnnnnnnnnnnnnnnnnnnnnnnnnnnnnnnnnnnnnnnnnnnnnnnnnnnnnnnnnnnnnnnnnnnnnnnnnnnnnnnnnnnnnnnnnnnnnnnnnnnnnnnnnnnnnnnnnnnnnnnnnnnnnnnnnnnnnnnnnnnnnnnnnnnnnnnnnnnnnnnnnnnnnnnnnnnnnnnnnnnnnnnnnnnnnnnnnnnnnnnnnnnnnnnnnnnnnnnnnnnnnnnnnnnnnnnnnnnnnnnnnnnnnnnnnnnnnnnnnnnnnnnnnnnnnnnnnnnnnnnnnnnnnnnnnnnnnnnnnnnnnnnnnnnnnnnnnnnnnnnnnnnnnnnnnnnnnnnnnnnnnnnnnnnnnnnnnnnnnnnnnnnnnnnnnnnnnnnnnnnnnnnnnnnnnnnnnnnnnnnnnnnnnnnnnnnnnnnnnnnnnnnnnnnnnnnnnnnnnnnnnnnnnnnnnnnnnnnnnnnnnnnnnnnnnnnnnnnnnnnnnnnnnnnnnnnnnnnnnnnnnnnnnnnnnnnnnnnnnnnnnnnnnnnnnnnnnnnnnnnnnnnnnnnnnnnnnnnnnnnnnnnnnnnnnnnnnnnnnnnnnnnnnnnnnnnnnnnnnnnnnnnnnnnnnnnnnnnnnnnnnnnnnnnnnnnnnnnnnnnnnnnnnnnnnnnnnnnnnnnnnnnnnnnnnnnnnnnnnnnnnnnnnnnnnnnnnnnnnnnnnnnnnnnnnnnnnnnnnnnnnnnnnnnnnnnnnnnnnnnnnnnnnnnnnnnnnnnnnnnnnnnnnnnnnnnnnnnnnnnnnnnnnnnnnnnnnnnnnnnnnnnnnnnnnnnnnnnnnnnnnnnnnnnnnnnnnnnnnnnnnnnnnnnnnnnnnnnnnnnnnnnnnnnnnnnnnnnnnnnnnnnnnnnnnnnnnnnnnnnnnnnnnnnnnnnnnnnnnnnnnnnnnnnnnnnnnnnnnnnnnnnnnnnnnnnnnnnnnnnnnnnnnnnnnnnnnnnnnnnnnnnnnnnnnnnnnnnnnnnnnnnnnnnnnnnnnnnnnnnnnnnnnnnnnnnnnnnnnnnnnnnnnnnnnnnnnnnnnnnnnnnnnnnnnnnnnnnnnnnnnnnnnnnnnnnnnnnnnnnnnnnnnnnnnnnnnnnnnnnnnnnnnnnnnnnnnnnnnnnnnnnnnnnnnnnnnnnnnnnnnnnnnnnnnnnnnnnnnnnnnnnnnnnnnnnnnnnnnnnnnnnnnnnnnnnnnnnnnnnnnnnnnnnnnnnnnnnnnnnnnnnnnnnnnnnnnnnnnnnnnnnnnnnnnnnnnnnnnnnnnnnnnnnnnnnnnnnnnnnnnnnnnnnnnnnnnnnnnnnnnnnnnnnnnnnnnnnnnnnnnnnnnnnnnnnnnnnnnnnnnnnnnnnnnnnnnnnnnnnnnnnnnnnnnnnnnnnnnnnnnnnnnnnnnnnnnnnnnnnnnnnnnnnnnnnnnnnnnnnnnnnnnnnnnnnnnnnnnnnnnnnnnnnnnnnnnnnnnnnnnnnnnnnnnnnnnnnnnnnnnnnnnnnnnnnnnnnnnnnnnnnnnnnnnnnnnnnnnnnnnnnnnnnnnnnnnnnnnnnnnnnnnnnnnnnnnnnnnnnnnnnnnnnnnnnnnnnnnnnnnnnnnnnnnnnnnnnnnnnnnnnnnnnnnnnnnnnnnnnnnnnnnnnnnnnnnnnnnnnnnnnnnnnnnnnnnnnnnnnnnnnnnnnnnnnnnnnnnnnnnnnnnnnnnnnnnnnnnnnnnnnnnnnnnnnnnnnnnnnnnnnnnnnnnnnnnnnnnnnnnnnnnnnnnnnnnnnnnnnnnnnnnnnnnnnnnnnnnnnnnnnnnnnnnnnnnnnnnnnnnnnnnnnnnnnnnnnnnnnnnnnnnnnnnnnnnnnnnnnnnnnnnnnnnnnnnnnnnnnnnnnnnnnnnnnnnnnnnnnnnnnnnnnnnnnnnnnnnnnnnnnnnnnnnnnnnnnnnnnnnnnnnnnnnnnnnnnnnnnnnnnnnnnnnnnnnnnnnnnnnnnnnnnnnnnnnnnnnnnnnnnnnnnnnnnnnnnnnnnnnnnnnnnnnnnnnnnnnnnnnnnnnnnnnnnnnnnnnnnnnnnnnnnnnnnnnnnnnnnnnnnnnnnnnnnnnnnnnnnnnnnnnnnnnnnnnnnnnnnnnnnnnnnnnnnnnnnnnnnnnnnnnnnnnnnnnnnnnnnnnnnnnnnnnnnnnnnnnnnnnnnnnnnnnnnnnnnnnnnnnnnnnnnnnnnnnnnnnnnnnnnnnnnnnnnnnnnnnnnnnnnnnnnnnnnnnnnnnnnnnnnnnnnnnnnnnnnnnnnnnnnnnnnnnnnnnnnnnnnnnnnnnnnnnnnnnnnnnnnnnnnnnnnnnnnnnnnnnnnnnnnnnnnnnnnnnnnnnnnnnnnnnnnnnnnnnnnnnnnnnnnnnnnnnnnnnnnnnnnnnnnnnnnnnnnnnnnnnnnnnnnnnnnnnnnnnnnnnnnnnnnnnnnnnnnnnnnnnnnnnnnnnnnnnnnnnnnnnnnnnnnnnnnnnnnnnnnnnnnnnnnnnnnnnnnnnnnnnnnnnnnnnnnnnnnnnnnnnnnnnnnnnnnnnnnnnnnnnnnnnnnnnnnnnnnnnnnnnnnnnnnnnnnnnnnnnnnnnnnnnnnnnnnnnnnnnnnnnnnnnnnnnnnnnnnnnnnnnnnnnnnnnnnnnnnnnnnnnnnnnnnnnnnnnnnnnnnnnnnnnnnnnnnnnnnnnnnnnnnnnnnnnnnnnnnnnnnnnnnnnnnnnnnnnnnnnnnnnnnnnnnnnnnnnnnnnnnnnnnnnnnnnnnnnnnnnnnnnnnnnnnnnnnnnnnnnnnnnnnnnnnnnnnnnnnnnnnnnnnnnnnnnnnnnnnnnnnnnnnnnnnnnnnnnnnnnnnnnnnnnnnnnnnnnnnnnnnnnnnnnnnnnnnnnnnnnnnnnnnnnnnnnnnnnnnnnnnnnnnnnnnnnnnnnnnnnnnnnnnnnnnnnnnnnnnnnnnnnnnnnnnnnnnnnnnnnnnnnnnnnnnnnnnnnnnnnnnnnnnnnnnnnnnnnnnnnnnnnnnnnnnnnnnnnnnnnnnnnnnnnnnnnnnnnnnnnnnnnnnnnnnnnnnnnnnnnnnnnnnnnnnnnnnnnnnnnnnnnnnnnnnnnnnnnnnnnnnnnnnnnnnnnnnnnnnnnnnnnnnnnnnnnnnnnnnnnnnnnnnnnnnnnnnnnnnnnnnnnnnnnnnnnnnnnnnnnnnnnnnnnnnnnnnnnnnnnnnnnnnnnnnnnnnnnnnnnnnnnnnnnnnnnnnnnnnnnnnnnnnnnnnnnnnnnnnnnnnnnnnnnnnnnnnnnnnnnnnnnnnnnnnnnnnnnnnnnnnnnnnnnnnnnnnnnnnnnnnnnnnnnnnnnnnnnnnnnnnnnnnnnnnnnnnnnnnnnnnnnnnnnnnnnnnnnnnnnnnnnnnnnnnnnnnnnnnnnnnnnnnnnnnnnnnnnnnnnnnnnnnnnnnnnnnnnnnnnnnnnnnnnnnnnnnnnnnnnnnnnnnnnnnnnnnnnnnnnnnnnnnnnnnnnnnnnnnnnnnnnnnnnnnnnnnnnnnnnnnnnnnnnnnnnnnnnnnnnnnnnnnnnnnnnnnnnnnnnnnnnnnnnnnnnnnnnnnnnnnnnnnnnnnnnnnnnnnnnnnnnnnnnnnnnnnnnnnnnnnnnnnnnnnnnnnnnnnnnnnnnnnnnnnnnnnnnnnnnnnnnnnnnnnnnnnnnnnnnnnnnnnnnnnnnnnnnnnnnnnnnnnnnnnnnnnnnnnnnnnnnnnnnnnnnnnnnnnnnnnnnnnnnnnnnnnnnnnnnnnnnnnnnnnnnnnnnnnnnnnnnnnnnnnnnnnnnnnnnnnnnnnnnnnnnnnnnnnnnnnnnnnnnnnnnnnnnnnnnnnnnnnnnnnnnnnnnnnnnnnnnnnnnnnnnnnnnnnnnnnnnnnnnnnnnnnnnnnnnnnnnnnnnnnnnnnnnnnnnnnnnnnnnnnnnnnnnnnnnnnnnnnnnnnnnnnnnnnnnnnnnnnnnnnnnnnnnnnnnnnnnnnnnnnnnnnnnnnnnnnnnnnnnnnnnnnnnnnnnnnnnnnnnnnnnnnnnnnnnnnnnnnnnnnnnnnnnnnnnnnnnnnnnnnnnnnnnnnnnnnnnnnnnnnnnnnnnnnnnnnnnnnnnnnnnnnnnnnnnnnnnnnnnnnnnnnnnnnnnnnnnnnnnnnnnnnnnnnnnnnnnnnnnnnnnnnnnnnnnnnnnnnnnnnnnnnnnnnnnnnnnnnnnnnnnnnnnnnnnnnnnnnnnnnnnnnnnnnnnnnnnnnnnnnnnnnnnnnnnnnnnnnnnnnnnnnnnnnnnnnnnnnnnnnnnnnnnnnnnnnnnnnnnnnnnnnnnnnnnnnnnnnnnnnnnnnnnnnnnnnnnnnnnnnnnnnnnnnnnnnnnnnnnnnnnnnnnnnnnnnnnnnnnnnnnnnnnnnnnnnnnnnnnnnnnnnnnnnnnnnnnnnnnnnnnnnnnnnnnnnnnnnnnnnnnnnnnnnnnnnnnnnnnnnnnnnnnnnnnnnnnnnnnnnnnnnnnnnnnnnnnnnnnnnnnnnnnnnnnnnnnnnnnnnnnnnnnnnnnnnnnnnnnnnnnnnnnnnnnnnnnnnnnnnnnnnnnnnnnnnnnnnnnnnnnnnnnnnnnnnnnnnnnnnnnnnnnnnnnnnnnnnnnnnnnnnnnnnnnnnnnnnnnnnnnnnnnnnnnnnnnnnnnnnnnnnnnnnnnnnnnnnnnnnnnnnnnnnnnnnnnnnnnnnnnnnnnnnnnnnnnnnnnnnnnnnnnnnnnnnnnnnnnnnnnnnnnnnnnnnnnnnnnnnnnnnnnnnnnnnnnnnnnnnnnnnnnnnnnnnnnnnnnnnnnnnnnnnnnnnnnnnnnnnnnnnnnnnnnnnnnnnnnnnnnnnnnnnnnnnnnnnnnnnnnnnnnnnnnnnnnnnnnnnnnnnnnnnnnnnnnnnnnnnnnnnnnnnnnnnnnnnnnnnnnnnnnnnnnnnnnnnnnnnnnnnnnnnnnnnnnnnnnnnnnnnnnnnnnnnnnnnnnnnnnnnnnnnnnnnnnnnnnnnnnnnnnnnnnnnnnnnnnnnnnnnnnnnnnnnnnnnnnnnnnnnnnnnnnnnnnnnnnnnnnnnnnnnnnnnnnnnnnnnnnnnnnnnnnnnnnnnnnnnnnnnnnnnnnnnnnnnnnnnnnnnnnnnnnnnnnnnnnnnnnnnnnnnnnnnnnnnnnnnnnnnnnnnnnnnnnnnnnnnnnnnnnnnnnnnnnnnnnnnnnnnnnnnnnnnnnnnnnnnnnnnnnnnnnnnnnnnnnnnnnnnnnnnnnnnnnnnnnnnnnnnnnnnnnnnnnnnnnnnnnnnnnnnnnnnnnnnnnnnnnnnnnnnnnnnnnnnnnnnnnnnnnnnnnnnnnnnnnnnnnnnnnnnnnnnnnnnnnnnnnnnnnnnnnnnnnnnnnnnnnnnnnnnnnnnnnnnnnnnnnnnnnnnnnnnnnnnnnnnnnnnnnnnnnnnnnnnnnnnnnnnnnnnnnnnnnnnnnnnnnnnnnnnnnnnnnnnnnnnnnnnnnnnnnnnnnnnnnnnnnnnnnnnnnnnnnnnnnnnnnnnnnnnnnnnnnnnnnnnnnnnnnnnnnnnnnnnnnnnnnnnnnnnnnnnnnnnnnnnnnnnnnnnnnnnnnnnnnnnnnnnnnnnnnnnnnnnnnnnnnnnnnnnnnnnnnnnnnnnnnnnnnnnnnnnnnnnnnnnnnnnnnnnnnnnnnnnnnnnnnnnnnnnnnnnnnnnnnnnnnnnnnnnnnnnnnnnnnnnnnnnnnnnnnnnnnnnnnnnnnnnnnnnnnnnnnnnnnnnnnnnnnnnnnnnnnnnnnnnnnnnnnnnnnnnnnnnnnnnnnnnnnnnnnnnnnnnnnnnnnnnnnnnnnnnnnnnnnnnnnnnnnnnnnnnnnnnnnnnnnnnnnnnnnnnnnnnnnnnnnnnnnnnnnnnnnnnnnnnnnnnnnnnnnnnnnnnnnnnnnnnnnnnnnnnnnnnnnnnnnnnnnnnnnnnnnnnnnnnnnnnnnnnnnnnnnnnnnnnnnnnnnnnnnnnnnnnnnnnnnnnnnnnnnnnnnnnnnnnnnnnnnnnnnnnnnnnnnnnnnnnnnnnnnnnnnnnnnnnnnnnnnnnnnnnnnnnnnnnnnnnnnnnnnnnnnnnnnnnnnnnnnnnnnnnnnnnnnnnnnnnnnnnnnnnnnnnnnnnnnnnnnnnnnnnnnnnnnnnnnnnnnnnnnnnnnnnnnnnnnnnnnnnnnnnnnnnnnnnnnnnnnnnnnnnnnnnnnnnnnnnnnnnnnnnnnnnnnnnnnnnnnnnnnnnnnnnnnnnnnnnnnnnnnnnnnnnnnnnnnnnnnnnnnnnnnnnnnnnnnnnnnnnnnnnnnnnnnnnnnnnnnnnnnnnnnnnnnnnnnnnnnnnnnnnnnnnnnnnnnnnnnnnnnnnnnnnnnnnnnnnnnnnnnnnnnnnnnnnnnnnnnnnnnnnnnnnnnnnnnnnnnnnnnnnnnnnnnnnnnnnnnnnnnnnnnnnnnnnnnnnnnnnnnnnnnnnnnnnnnnnnnnnnnnnnnnnnnnnnnnnnnnnnnnnnnnnnnnnnnnnnnnnnnnnnnnnnnnnnnnnnnnnnnnnnnnnnnnnnnnnnnnnnnnnnnnnnnnnnnnnnnnnnnnnnnnnnnnnnnnnnnnnnnnnnnnnnnnnnnnnnnnnnnnnnnnnnnnnnnnnnnnnnnnnnnnnnnnnnnnnnnnnnnnnnnnnnnnnnnnnnnnnnnnnnnnnnnnnnnnnnnnnnnnnnnnnnnnnnnnnnnnnnnnnnnnnnnnnnnnnnnnnnnnnnnnnnnnnnnnnnnnnnnnnnnnnnnnnnnnnnnnnnnnnnnnnnnnnnnnnnnnnnnnnnnnnnnnnnnnnnnnnnnnnnnnnnnnnnnnnnnnnnnnnnnnnnnnnnnnnnnnnnnnnnnnnnnnnnnnnnnnnnnnnnnnnnnnnnnnnnnnnnnnnnnnnnnnnnnnnnnnnnnnnnnnnnnnnnnnnnnnnnnnnnnnnnnnnnnnnnnnnnnnnnnnnnnnnnnnnnnnnnnnnnnnnnnnnnnnnnnnnnnnnnnnnnnnnnnnnnnnnnnnnnnnnnnnnnnnnnnnnnnnnnnnnnnnnnnnnnnnnnnnnnnnnnnnnnnnnnnnnnnnnnnnnnnnnnnnnnnnnnnnnnnnnnnnnnnnnnnnnnnnnnnnnnnnnnnnnnnnnnnnnnnnnnnnnnnnnnnnnnnnnnnnnnnnnnnnnnnnnnnnnnnnnnnnnnnnnnnnnnnnnnnnnnnnnnnnnnnnnnnnnnnnnnnnnnnnnnnnnnnnnnnnnnnnnnnnnnnnnnnnnnnnnnnnnnnnnnnnnnnnnnnnnnnnnnnnnnnnnnnnnnnnnnnnnnnnnnnnnnnnnnnnnnnnnnnnnnnnnnnnnnnnnnnnnnnnnnnnnnnnnnnnnnnnnnnnnnnnnnnnnnnnnnnnnnnnnnnnnnnnnnnnnnnnnnnnnnnnnnnnnnnnnnnnnnnnnnnnnnnnnnnnnnnnnnnnnnnnnnnnnnnnnnnnnnnnnnnnnnnnnnnnnnnnnnnnnnnnnnnnnnnnnnnnnnnnnnnnnnnnnnnnnnnnnnnnnnnnnnnnnnnnnnnnnnnnnnnnnnnnnnnnnnnnnnnnnnnnnnnnnnnnnnnnnnnnnnnnnnnnnnnnnnnnnnnnnnnnnnnnnnnnnnnnnnnnnnnnnnnnnnnnnnnnnnnnnnnnnnnnnnnnnnnnnnnnnnnnnnnnnnnnnnnnnnnnnnnnnnnnnnnnnnnnnnnnnnnnnnnnnnnnnnnnnnnnnnnnnnnnnnnnnnnnnnnnnnnnnnnnnnnnnnnnnnnnnnnnnnnnnnnnnnnnnnnnnnnnnnnnnnnnnnnnnnnnnnnnnnnnnnnnnnnnnnnnnnnnnnnnnnnnnnnnnnnnnnnnnnnnnnnnnnnnnnnnnnnnnnnnnnnnnnnnnnnnnnnnnnnnnnnnnnnnnnnnnnnnnnnnnnnnnnnnnnnnnnnnnnnnnnnnnnnnnnnnnnnnnnnnnnnnnnnnnnnnnnnnnnnnnnnnnnnnnnnnnnnnnnnnnnnnnnnnnnnnnnnnnnnnnnnnnnnnnnnnnnnnnnnnnnnnnnnnnnnnnnnnnnnnnnnnnnnnnnnnnnnnnnnnnnnnnnnnnnnnnnnnnnnnnnnnnnnnnnnnnnnnnnnnnnnnnnnnnnnnnnnnnnnnnnnnnnnnnnnnnnnnnnnnnnnnnnnnnnnnnnnnnnnnnnnnnnnnnnnnnnnnnnnnnnnnnnnnnnnnnnnnnnnnnnnnnnnnnnnnnnnnnnnnnnnnnnnnnnnnnnnnnnnnnnnnnnnnnnnnnnnnnnnnnnnnnnnnnnnnnnnnnnnnnnnnnnnnnnnnnnnnnnnnnnnnnnnnnnnnnnnnnnnnnnnnnnnnnnnnnnnnnnnnnnnnnnnnnnnnnnnnnnnnnnnnnnnnnnnnnnnnnnnnnnnnnnnnnnnnnnnnnnnnnnnnnnnnnnnnnnnnnnnnnnnnnnnnnnnnnnnnnnnnnnnnnnnnnnnnnnnnnnnnnnnnnnnnnnnnnnnnnnnnnnnnnnnnnnnnnnnnnnnnnnnnnnnnnnnnnnnnnnnnnnnnnnnnnnnnnnnnnnnnnnnnnnnnnnnnnnnnnnnnnnnnnnnnnnnnnnnnnnnnnnnnnnnnnnnnnnnnnnnnnnnnnnnnnnnnnnnnnnnnnnnnnnnnnnnnnnnnnnnnnnnnnnnnnnnnnnnnnnnnnnnnnnnnnnnnnnnnnnnnnnnnnnnnnnnnnnnnnnnnnnnnnnnnnnnnnnnnnnnnnnnnnnnnnnnnnnnnnnnnnnnnnnnnnnnnnnnnnnnnnnnnnnnnnnnnnnnnnnnnnnnnnnnnnnnnnnnnnnnnnnnnnnnnnnnnnnnnnnnnnnnnnnnnnnnnnnnnnnnnnnnnnnnnnnnnnnnnnnnnnnnnnnnnnnnnnnnnnnnnnnnnnnnnnnnnnnnnnnnnnnnnnnnnnnnnnnnnnnnnnnnnnnnnnnnnnnnnnnnnnnnnnnnnnnnnnnnnnnnnnnnnnnnnnnnnnnnnnnnnnnnnnnnnnnnnnnnnnnnnnnnnnnnnnnnnnnnnnnnnnnnnnnnnnnnnnnnnnnnnnnnnnnnnnnnnnnnnnnnnnnnnnnnnnnnnnnnnnnnnnnnnnnnnnnnnnnnnnnnnnnnnnnnnnnnnnnnnnnnnnnnnnnnnnnnnnnnnnnnnnnnnnnnnnnnnnnnnnnnnnnnnnnnnnnnnnnnnnnnnnnnnnnnnnnnnnnnnnnnnnnnnnnnnnnnnnnnnnnnnnnnnnnnnnnnnnnnnnnnnnnnnnnnnnnnnnnnnnnnnnnnnnnnnnnnnnnnnnnnnnnnnnnnnnnnnnnnnnnnnnnnnnnnnnnnnnnnnnnnnnnnnnnnnnnnnnnnnnnnnnnnnnnnnnnnnnnnnnnnnnnnnnnnnnnnnnnnnnnnnnnnnnnnnnnnnnnnnnnnnnnnnnnnnnnnnnnnnnnnnnnnnnnnnnnnnnnnnnnnnnnnnnnnnnnnnnnnnnnnnnnnnnnnnnnnnnnnnnnnnnnnnnnnnnnnnnnnnnnnnnnnnnnnnnnnnnnnnnnnnnnnnnnnnnnnnnnnnnnnnnnnnnnnnnnnnnnnnnnnnnnnnnnnnnnnnnnnnnnnnnnnnnnnnnnnnnnnnnnnnnnnnnnnnnnnnnnnnnnnnnnnnnnnnnnnnnnnnnnnnnnnnnnnnnnnnnnnnnnnnnnnnnnnnnnnnnnnnnnnnnnnnnnnnnnnnnnnnnnnnnnnnnnnnnnnnnnnnnnnnnnnnnnnnnnnnnnnnnnnnnnnnnnnnnnnnnnnnnnnnnnnnnnnnnnnnnnnnnnnnnnnnnnnnnnnnnnnnnnnnnnnnnnnnnnnnnnnnnnnnnnnnnnnnnnnnnnnnnnnnnnnnnnnnnnnnnnnnnnnnnnnnnnnnnnnnnnnnnnnnnnnnnnnnnnnnnnnnnnnnnnnnnnnnnnnnnnnnnnnnnnnnnnnnnnnnnnnnnnnnnnnnnnnnnnnnnnnnnnnnnnnnnnnnnnnnnnnnnnnnnnnnnnnnnnnnnnnnnnnnnnnnnnnnnnnnnnnnnnnnnnnnnnnnnnnnnnnnnnnnnnnnnnnnnnnnnnnnnnnnnnnnnnnnnnnnnnnnnnnnnnnnnnnnnnnnnnnnnnnnnnnnnnnnnnnnnnnnnnnnnnnnnnnnnnnnnnnnnnnnnnnnnnnnnnnnnnnnnnnnnnnnnnnnnnnnnnnnnnnnnnnnnnnnnnnnnnnnnnnnnnnnnnnnnnnnnnnnnnnnnnnnnnnnnnnnnnnnnnnnnnnnnnnnnnnnnnnnnnnnnnnnnnnnnnnnnnnnnnnnnnnnnnnnnnnnnnnnnnnnnnnnnnnnnnnnnnnnnnnnnnnnnnnnnnnnnnnnnnnnnnnnnnnnnnnnnnnnnnnnnnnnnnnnnnnnnnnnnnnnnnnnnnnnnnnnnnnnnnnnnnnnnnnnnnnnnnnnnnnnnnnnnnnnnnnnnnnnnnnnnnnnnnnnnnnnnnnnnnnnnnnnnnnnnnnnnnnnnnnnnnnnnnnnnnnnnnnnnnnnnnnnnnnnnnnnnnnnnnnnnnnnnnnnnnnnnnnnnnnnnnnnnnnnnnnnnnnnnnnnnnnnnnnnnnnnnnnnnnnnnnnnnnnnnnnnnnnnnnnnnnnnnnnnnnnnnnnnnnnnnnnnnnnnnnnnnnnnnnnnnnnnnnnnnnnnnnnnnnnnnnnnnnnnnnnnnnnnnnnnnnnnnnnnnnnnnnnnnnnnnnnnnnnnnnnnnnnnnnnnnnnnnnnnnnnnnnnnnnnnnnnnnnnnnnnnnnnnnnnnnnnnnnnnnnnnnnnnnnnnnnnnnnnnnnnnnnnnnnnnnnnnnnnnnnnnnnnnnnnnnnnnnnnnnnnnnnnnnnnnnnnnnnnnnnnnnnnnnnnnnnnnnnnnnnnnnnnnnnnnnnnnnnnnnnnnnnnnnnnnnnnnnnnnnnnnnnnnnnnnnnnnnnnnnnnnnnnnnnnnnnnnnnnnnnnnnnnnnnnnnnnnnnnnnnnnnnnnnnnnnnnnnnnnnnnnnnnnnnnnnnnnnnnnnnnnnnnnnnnnnnnnnnnnnnnnnnnnnnnnnnnnnnnnnnnnnnnnnnnnnnnnnnnnnnnnnnnnnnnnnnnnnnnnnnnnnnnnnnnnnnnnnnnnnnnnnnnnnnnnnnnnnnnnnnnnnnnnnnnnnnnnnnnnnnnnnnnnnnnnnnnnnnnnnnnnnnnnnnnnnnnnnnnnnnnnnnnnnnnnnnnnnnnnnnnnnnnnnnnnnnnnnnnnnnnnnnnnnnnnnnnnnnnnnnnnnnnnnnnnnnnnnnnnnnnnnnnnnnnnnnnnnnnnnnnnnnnnnnnnnnnnnnnnnnnnnnnnnnnnnnnnnnnnnnnnnnnnnnnnnnnnnnnnnnnnnnnnnnnnnnnnnnnnnnnnnnnnnnnnnnnnnnnnnnnnnnnnnnnnnnnnnnnnnnnnnnnnnnnnnnnnnnnnnnnnnnnnnnnnnnnnnnnnnnnnnnnnnnnnnnnnnnnnnnnnnnnnnnnnnnnnnnnnnnnnnnnnnnnnnnnnnnnnnnnnnnnnnnnnnnnnnnnnnnnnnnnnnnnnnnnnnnnnnnnnnnnnnnnnnnnnnnnnnnnnnnnnnnnnnnnnnnnnnnnnnnnnnnnnnnnnnnnnnnnnnnnnnnnnnnnnnnnnnnnnnnnnnnnnnnnnnnnnnnnnnnnnnnnnnnnnnnnnnnnnnnnnnnnnnnnnnnnnnnnnnnnnnnnnnnnnnnnnnnnnnnnnnnnnnnnnnnnnnnnnnnnnnnnnnnnnnnnnnnnnnnnnnnnnnnnnnnnnnnnnnnnnnnnnnnnnnnnnnnnnnnnnnnnnnnnnnnnnnnnnnnnnnnnnnnnnnnnnnnnnnnnnnnnnnnnnnnnnnnnnnnnnnnnnnnnnnnnnnnnnnnnnnnnnnnnnnnnnnnnnnnnnnnnnnnnnnnnnnnnnnnnnnnnnnnnnnnnnnnnnnnnnnnnnnnnnnnnnnnnnnnnnnnnnnnnnnnnnnnnnnnnnnnnnnnnnnnnnnnnnnnnnnnnnnnnnnnnnnnnnnnnnnnnnnnnnnnnnnnnnnnnnnnnnnnnnnnnnnnnnnnnnnnnnnnnnnnnnnnnnnnnnnnnnnnnnnnnnnnnnnnnnnnnnnnnnnnnnnnnnnnnnnnnnnnnnnnnnnnnnnnnnnnnnnnnnnnnnnnnnnnnnnnnnnnnnnnnnnnnnnnnnnnnnnnnnnnnnnnnnnnnnnnnnnnnnnnnnnnnnnnnnnnnnnnnnnnnnnnnnnnnnnnnnnnnnnnnnnnnnnnnnnnnnnnnnnnnnnnnnnnnnnnnnnnnnnnnnnnnnnnnnnnnnnnnnnnnnnnnnnnnnnnnnnnnnnnnnnnnnnnnnnnnnnnnnnnnnnnnnnnnnnnnnnnnnnnnnnnnnnnnnnnnnnnnnnnnnnnnnnnnnnnnnnnnnnnnnnnnnnnnnnnnnnnnnnnnnnnnnnnnnnnnnnnnnnnnnnnnnnnnnnnnnnnnnnnnnnnnnnnnnnnnnnnnnnnnnnnnnnnnnnnnnnnnnnnnnnnnnnnnnnnnnnnnnnnnnnnnnnnnnnnnnnnnnnnnnnnnnnnnnnnnnnnnnnnnnnnnnnnnnnnnnnnnnnnnnnnnnnnnnnnnnnnnnnnnnnnnnnnnnnnnnnnnnnnnnnnnnnnnnnnnnnnnnnnnnnnnnnnnnnnnnnnnnnnnnnnnnnnnnnnnnnnnnnnnnnnnnnnnnnnnnnnnnnnnnnnnnnnnnnnnnnnnnnnnnnnnnnnnnnnnnnnnnnnnnnnnnnnnnnnnnnnnnnnnnnnnnnnnnnnnnnnnnnnnnnnnnnnnnnnnnnnnnnnnnnnnnnnnnnnnnnnnnnnnnnnnnnnnnnnnnnnnnnnnnnnnnnnnnnnnnnnnnnnnnnnnnnnnnnnnnnnnnnnnnnnnnnnnnnnnnnnnnnnnnnnnnnnnnnnnnnnnnnnnnnnnnnnnnnnnnnnnnnnnnnnnnnnnnnnnnnnnnnnnnnnnnnnnnnnnnnnnnnnnnnnnnnnnnnnnnnnnnnnnnnnnnnnnnnnnnnnnnnnnnnnnnnnnnnnnnnnnnnnnnnnnnnnnnnnnnnnnnnnnnnnnnnnnnnnnnnnnnnnnnnnnnnnnnnnnnnnnnnnnnnnnnnnnnnnnnnnnnnnnnnnnnnnnnnnnnnnnnnnnnnnnnnnnnnnnnnnnnnnnnnnnnnnnnnnnnnnnnnnnnnnnnnnnnnnnnnnnnnnnnnnnnnnnnnnnnnnnnnnnnnnnnnnnnnnnnnnnnnnnnnnnnnnnnnnnnnnnnnnnnnnnnnnnnnnnnnnnnnnnnnnnnnnnnnnnnnnnnnnnnnnnnnnnnnnnnnnnnnnnnnnnnnnnnnnnnnnnnnnnnnnnnnnnnnnnnnnnnnnnnnnnnnnnnnnnnnnnnnnnnnnnnnnnnnnnnnnnnnnnnnnnnnnnnnnnnnnnnnnnnnnnnnnnnnnnnnnnnnnnnnnnnnnnnnnnnnnnnnnnnnnnnnnnnnnnnnnnnnnnnnnnnnnnnnnnnnnnnnnnnnnnnnnnnnnnnnnnnnnnnnnnnnnnnnnnnnnnnnnnnnnnnnnnnnnnnnnnnnnnnnnnnnnnnnnnnnnnnnnnnnnnnnnnnnnnnnnnnnnnnnnnnnnnnnnnnnnnnnnnnnnnnnnnnnnnnnnnnnnnnnnnnnnnnnnnnnnnnnnnnnnnnnnnnnnnnnnnnnnnnnnnnnnnnnnnnnnnnnnnnnnnnnnnnnnnnnnnnnnnnnnnnnnnnnnnnnnnnnnnnnnnnnnnnnnnnnnnnnnnnnnnnnnnnnnnnnnnnnnnnnnnnnnnnnnnnnnnnnnnnnnnnnnnnnnnnnnnnnnnnnnnnnnnnnnnnnnnnnnnnnnnnnnnnnnnnnnnnnnnnnnnnnnnnnnnnnnnnnnnnnnnnnnnnnnnnnnnnnnnnnnnnnnnnnnnnnnnnnnnnnnnnnnnnnnnnnnnnnnnnnnnnnnnnnnnnnnnnnnnnnnnnnnnnnnnnnnnnnnnnnnnnnnnnnnnnnnnnnnnnnnnnnnnnnnnnnnnnnnnnnnnnnnnnnnnnnnnnnnnnnnnnnnnnnnnnnnnnnnnnnnnnnnnnnnnnnnnnnnnnnnnnnnnnnnnnnnnnnnnnnnnnnnnnnnnnnnnnnnnnnnnnnnnnnnnnnnnnnnnnnnnnnnnnnnnnnnnnnnnnnnnnnnnnnnnnnnnnnnnnnnnnnnnnnnnnnnnnnnnnnnnnnnnnnnnnnnnnnnnnnnnnnnnnnnnnnnnnnnnnnnnnnnnnnnnnnnnnnnnnnnnnnnnnnnnnnnnnnnnnnnnnnnnnnnnnnnnnnnnnnnnnnnnnnnnnnnnnnnnnnnnnnnnnnnnnnnnnnnnnnnnnnnnnnnnnnnnnnnnnnnnnnnnnnnnnnnnnnnnnnnnnnnnnnnnnnnnnnnnnnnnnnnnnnnnnnnnnnnnnnnnnnnnnnnnnnnnnnnnnnnnnnnnnnnnnnnnnnnnnnnnnnnnnnnnnnnnnnnnnnnnnnnnnnnnnnnnnnnnnnnnnnnnnnnnnnnnnnnnnnnnnnnnnnnnnnnnnnnnnnnnnnnnnnnnnnnnnnnnnnnnnnnnnnnnnnnnnnnnnnnnnnnnnnnnnnnnnnnnnnnnnnnnnnnnnnnnnnnnnnnnnnnnnnnnnnnnnnnnnnnnnnnnnnnnnnnnnnnnnnnnnnnnnnnnnnnnnnnnnnnnnnnnnnnnnnnnnnnnnnnnnnnnnnnnnnnnnnnnnnnnnnnnnnnnnnnnnnnnnnnnnnnnnnnnnnnnnnnnnnnnnnnnnnnnnnnnnnnnnnnnnnnnnnnnnnnnnnnnnnnnnnnnnnnnnnnnnnnnnnnnnnnnnnnnnnnnnnnnnnnnnnnnnnnnnnnnnnnnnnnnnnnnnnnnnnnnnnnnnnnnnnnnnnnnnnnnnnnnnnnnnnnnnnnnnnnnnnnnnnnnnnnnnnnnnnnnnnnnnnnnnnnnnnnnnnnnnnnnnnnnnnnnnnnnnnnnnnnnnnnnnnnnnnnnnnnnnnnnnnnnnnnnnnnnnnnnnnnnnnnnnnnnnnnnnnnnnnnnnnnnnnnnnnnnnnnnnnnnnnnnnnnnnnnnnnnnnnnnnnnnnnnnnnnnnnnnnnnnnnnnnnnnnnnnnnnnnnnnnnnnnnnnnnnnnnnnnnnnnnnnnnnnnnnnnnnnnnnnnnnnnnnnnnnnnnnnnnnnnnnnnnnnnnnnnnnnnnnnnnnnnnnnnnnnnnnnnnnnnnnnnnnnnnnnnnnnnnnnnnnnnnnnnnnnnnnnnnnnnnnnnnnnnnnnnnnnnnnnnnnnnnnnnnnnnnnnnnnnnnnnnnnnnnnnnnnnnnnnnnnnnnnnnnnnnnnnnnnnnnnnnnnnnnnnnnnnnnnnnnnnnnnnnnnnnnnnnnnnnnnnnnnnnnnnnnnnnnnnnnnnnnnnnnnnnnnnnnnnnnnnnnnnnnnnnnnnnnnnnnnnnnnnnnnnnnnnnnnnnnnnnnnnnnnnnnnnnnnnnnnnnnnnnnnnnnnnnnnnnnnnnnnnnnnnnnnnnnnnnnnnnnnnnnnnnnnnnnnnnnnnnnnnnnnnnnnnnnnnnnnnnnnnnnnnnnnnnnnnnnnnnnnnnnnnnnnnnnnnnnnnnnnnnnnnnnnnnnnnnnnnnnnnnnnnnnnnnnnnnnnnnnnnnnnnnnnnnnnnnnnnnnnnnnnnnnnnnnnnnnnnnnnnnnnnnnnnnnnnnnnnnnnnnnnnnnnnnnnnnnnnnnnnnnnnnnnnnnnnnnnnnnnnnnnnnnnnnnnnnnnnnnnnnnnnnnnnnnnnnnnnnnnnnnnnnnnnnnnnnnnnnnnnnnnnnnnnnnnnnnnnnnnnnnnnnnnnnnnnnnnnnnnnnnnnnnnnnnnnnnnnnnnnnnnnnnnnnnnnnnnnnnnnnnnnnnnnnnnnnnnnnnnnnnnnnnnnnnnnnnnnnnnnnnnnnnnnnnnnnnnnnnnnnnnnnnnnnnnnnnnnnnnnnnnnnnnnnnnnnnnnnnnnnnnnnnnnnnnnnnnnnnnnnnnnnnnnnnnnnnnnnnnnnnnnnnnnnnnnnnnnnnnnnnnnnnnnnnnnnnnnnnnnnnnnnnnnnnnnnnnnnnnnnnnnnnnnnnnnnnnnnnnnnnnnnnnnnnnnnnnnnnnnnnnnnnnnnnnnnnnnnnnnnnnnnnnnnnnnnnnnnnnnnnnnnnnnnnnnnnnnnnnnnnnnnnnnnnnnnnnnnnnnnnnnnnnnnnnnnnnnnnnnnnnnnnnnnnnnnnnnnnnnnnnnnnnnnnnnnnnnnnnnnnnnnnnnnnnnnnnnnnnnnnnnnnnnnnnnnnnnnnnnnnnnnnnnnnnnnnnnnnnnnnnnnnnnnnnnnnnnnnnnnnnnnnnnnnnnnnnnnnnnnnnnnnnnnnnnnnnnnnnnnnnnnnnnnnnnnnnnnnnnnnnnnnnnnnnnnnnnnnnnnnnnnnnnnnnnnnnnnnnnnnnnnnnnnnnnnnnnnnnnnnnnnnnnnnnnnnnnnnnnnnnnnnnnnnnnnnnnnnnnnnnnnnnnnnnnnnnnnnnnnnnnnnnnnnnnnnnnnnnnnnnnnnnnnnnnnnnnnnnnnnnnnnnnnnnnnnnnnnnnnnnnnnnnnnnnnnnnnnnnnnnnnnnnnnnnnnnnnnnnnnnnnnnnnnnnnnnnnnnnnnnnnnnnnnnnnnnnnnnnnnnnnnnnnnnnnnnnnnnnnnnnnnnnnnnnnnnnnnnnnnnnnnnnnnnnnnnnnnnnnnnnnnnnnnnnnnnnnnnnnnnnnnnnnnnnnnnnnnnnnnnnnnnnnnnnnnnnnnnnnnnnnnnnnnnnnnnnnnnnnnnnnnnnnnnnnnnnnnnnnnnnnnnnnnnnnnnnnnnnnnnnnnnnnnnnnnnnnnnnnnnnnnnnnnnnnnnnnnnnnnnnnnnnnnnnnnnnnnnnnnnnnnnnnnnnnnnnnnnnnnnnnnnnnnnnnnnnnnnnnnnnnnnnnnnnnnnnnnnnnnnnnnnnnnnnnnnnnnnnnnnnnnnnnnnnnnnnnnnnnnnnnnnnnnnnnnnnnnnnnnnnnnnnnnnnnnnnnnnnnnnnnnnnnnnnnnnnnnnnnnnnnnnnnnnnnnnnnnnnnnnnnnnnnnnnnnnnnnnnnnnnnnnnnnnnnnnnnnnnnnnnnnnnnnnnnnnnnnnnnnnnnnnnnnnnnnnnnnnnnnnnnnnnnnnnnnnnnnnnnnnnnnnnnnnnnnnnnnnnnnnnnnnnnnnnnnnnnnnnnnnnnnnnnnnnnnnnnnnnnnnnnnnnnnnnnnnnnnnnnnnnnnnnnnnnnnnnnnnnnnnnnnnnnnnnnnnnnnnnnnnnnnnnnnnnnnnnnnnnnnnnnnnnnnnnnnnnnnnnnnnnnnnnnnnnnnnnnnnnnnnnnnnnnnnnnnnnnnnnnnnnnnnnnnnnnnnnnnnnnnnnnnnnnnnnnnnnnnnnnnnnnnnnnnnnnnnnnnnnnnnnnnnnnnnnnnnnnnnnnnnnnnnnnnnnnnnnnnnnnnnnnnnnnnnnnnnnnnnnnnnnnnnnnnnnnnnnnnnnnnnnnnnnnnnnnnnnnnnnnnnnnnnnnnnnnnnnnnnnnnnnnnnnnnnnnnnnnnnnnnnnnnnnnnnnnnnnnnnnnnnnnnnnnnnnnnnnnnnnnnnnnnnnnnnnnnnnnnnnnnnnnnnnnnnnnnnnnnnnnnnnnnnnnnnnnnnnnnnnnnnnnnnnnnnnnnnnnnnnnnnnnnnnnnnnnnnnnnnnnnnnnnnnnnnnnnnnnnnnnnnnnnnnnnnnnnnnnnnnnnnnnnnnnnnnnnnnnnnnnnnnnnnnnnnnnnnnnnnnnnnnnnnnnnnnnnnnnnnnnnnnnnnnnnnnnnnnnnnnnnnnnnnnnnnnnnnnnnnnnnnnnnnnnnnnnnnnnnnnnnnnnnnnnnnnnnnnnnnnnnnnnnnnnnnnnnnnnnnnnnnnnnnnnnnnnnnnnnnnnnnnnnnnnnnnnnnnnnnnnnnnnnnnnnnnnnnnnnnnnnnnnnnnnnnnnnnnnnnnnnnnnnnnnnnnnnnnnnnnnnnnnnnnnnnnnnnnnnnnnnnnnnnnnnnnnnnnnnnnnnnnnnnnnnnnnnnnnnnnnnnnnnnnnnnnnnnnnnnnnnnnnnnnnnnnnnnnnnnnnnnnnnnnnnnnnnnnnnnnnnnnnnnnnnnnnnnnnnnnnnnnnnnnnnnnnnnnnnnnnnnnnnnnnnnnnnnnnnnnnnnnnnnnnnnnnnnnnnnnnnnnnnnnnnnnnnnnnnnnnnnnnnnnnnnnnnnnnnnnnnnnnnnnnnnnnnnnnnnnnnnnnnnnnnnnnnnnnnnnnnnnnnnnnnnnnnnnnnnnnnnnnnnnnnnnnnnnnnnnnnnnnnnnnnnnnnnnnnnnnnnnnnnnnnnnnnnnnnnnnnnnnnnnnnnnnnnnnnnnnnnnnnnnnnnnnnnnnnnnnnnnnnnnnnnnnnnnnnnnnnnnnnnnnnnnnnnnnnnnnnnnnnnnnnnnnnnnnnnnnnnnnnnnnnnnnnnnnnnnnnnnnnnnnnnnnnnnnnnnnnnnnnnnnnnnnnnnnnnnnnnnnnnnnnnnnnnnnnnnnnnnnnnnnnnnnnnnnnnnnnnnnnnnnnnnnnnnnnnnnnnnnnnnnnnnnnnnnnnnnnnnnnnnnnnnnnnnnnnnnnnnnnnnnnnnnnnnnnnnnnnnnnnnnnnnnnnnnnnnnnnnnnnnnnnnnnnnnnnnnnnnnnnnnnnnnnnnnnnnnnnnnnnnnnnnnnnnnnnnnnnnnnnnnnnnnnnnnnnnnnnnnnnnnnnnnnnnnnnnnnnnnnnnnnnnnnnnnnnnnnnnnnnnnnnnnnnnnnnnnnnnnnnnnnnnnnnnnnnnnnnnnnnnnnnnnnnnnnnnnnnnnnnnnnnnnnnnnnnnnnnnnnnnnnnnnnnnnnnnnnnnnnnnnnnnnnnnnnnnnnnnnnnnnnnnnnnnnnnnnnnnnnnnnnnnnnnnnnnnnnnnnnnnnnnnnnnnnnnnnnnnnnnnnnnnnnnnnnnnnnnnnnnnnnnnnnnnnnnnnnnnnnnnnnnnnnnnnnnnnnnnnnnnnnnnnnnnnnnnnnnnnnnnnnnnnnnnnnnnnnnnnnnnnnnnnnnnnnnnnnnnnnnnnnnnnnnnnnnnnnnnnnnnnnnnnnnnnnnnnnnnnnnnnnnnnnnnnnnnnnnnnnnnnnnnnnnnnnnnnnnnnnnnnnnnnnnnnnnnnnnnnnnnnnnnnnnnnnnnnnnnnnnnnnnnnnnnnnnnnnnnnnnnnnnnnnnnnnnnnnnnnnnnnnnnnnnnnnnnnnnnnnnnnnnnnnnnnnnnnnnnnnnnnnnnnnnnnnnnnnnnnnnnnnnnnnnnnnnnnnnnnnnnnnnnnnnnnnnnnnnnnnnnnnnnnnnnnnnnnnnnnnnnnnnnnnnnnnnnnnnnnnnnnnnnnnnnnnnnnnnnnnnnnnnnnnnnnnnnnnnnnnnnnnnnnnnnnnnnnnnnnnnnnnnnnnnnnnnnnnnnnnnnnnnnnnnnnnnnnnnnnnnnnnnnnnnnnnnnnnnnnnnnnnnnnnnnnnnnnnnnnnnnnnnnnnnnnnnnnnnnnnnnnnnnnnnnnnnnnnnnnnnnnnnnnnnnnnnnnnnnnnnnnnnnnnnnnnnnnnnnnnnnnnnnnnnnnnnnnnnnnnnnnnnnnnnnnnnnnnnnnnnnnnnnnnnnnnnnnnnnnnnnnnnnnnnnnnnnnnnnnnnnnnnnnnnnnnnnnnnnnnnnnnnnnnnnnnnnnnnnnnnnnnnnnnnnnnnnnnnnnnnnnnnnnnnnnnnnnnnnnnnnnnnnnnnnnnnnnnnnnnnnnnnnnnnnnnnnnnnnnnnnnnnnnnnnnnnnnnnnnnnnnnnnnnnnnnnnnnnnnnnnnnnnnnnnnnnnnnnnnnnnnnnnnnnnnnnnnnnnnnnnnnnnnnnnnnnnnnnnnnnnnnnnnnnnnnnnnnnnnnnnnnnnnnnnnnnnnnnnnnnnnnnnnnnnnnnnnnnnnnnnnnnnnnnnnnnnnnnnnnnnnnnnnnnnnnnnnnnnnnnnnnnnnnnnnnnnnnnnnnnnnnnnnnnnnnnnnnnnnnnnnnnnnnnnnnnnnnnnnnnnnnnnnnnnnnnnnnnnnnnnnnnnnnnnnnnnnnnnnnnnnnnnnnnnnnnnnnnnnnnnnnnnnnnnnnnnnnnnnnnnnnnnnnnnnnnnnnnnnnnnnnnnnnnnnnnnnnnnnnnnnnnnnnnnnnnnnnnnnnnnnnnnnnnnnnnnnnnnnnnnnnnnnnnnnnnnnnnnnnnnnnnnnnnnnnnnnnnnnnnnnnnnnnnnnnnnnnnnnnnnnnnnnnnnnnnnnnnnnnnnnnnnnnnnnnnnnnnnnnnnnnnnnnnnnnnnnnnnnnnnnnnnnnnnnnnnnnnnnnnnnnnnnnnnnnnnnnnnnnnnnnnnnnnnnnnnnnnnnnnnnnnnnnnnnnnnnnnnnnnnnnnnnnnnnnnnnnnnnnnnnnnnnnnnnnnnnnnnnnnnnnnnnnnnnnnnnnnnnnnnnnnnnnnnnnnnnnnnnnnnnnnnnnnnnnnnnnnnnnnnnnnnnnnnnnnnnnnnnnnnnnnnnnnnnnnnnnnnnnnnnnnnnnnnnnnnnnnnnnnnnnnnnnnnnnnnnnnnnnnnnnnnnnnnnnnnnnnnnnnnnnnnnnnnnnnnnnnnnnnnnnnnnnnnnnnnnnnnnnnnnnnnnnnnnnnnnnnnnnnnnnnnnnnnnnnnnnnnnnnnnnnnnnnnnnnnnnnnnnnnnnnnnnnnnnnnnnnnnnnnnnnnnnnnnnnnnnnnnnnnnnnnnnnnnnnnnnnnnnnnnnnnnnnnnnnnnnnnnnnnnnnnnnnnnnnnnnnnnnnnnnnnnnnnnnnnnnnnnnnnnnnnnnnnnnnnnnnnnnnnnnnnnnnnnnnnnnnnnnnnnnnnnnnnnnnnnnnnnnnnnnnnnnnnnnnnnnnnnnnnnnnnnnnnnnnnnnnnnnnnnnnnnnnnnnnnnnnnnnnnnnnnnnnnnnnnnnnnnnnnnnnnnnnnnnnnnnnnnnnnnnnnnnnnnnnnnnnnnnnnnnnnnnnnnnnnnnnnnnnnnnnnnnnnnnnnnnnnnnnnnnnnnnnnnnnnnnnnnnnnnnnnnnnnnnnnnnnnnnnnnnnnnnnnnnnnnnnnnnnnnnnnnnnnnnnnnnnnnnnnnnnnnnnnnnnnnnnnnnnnnnnnnnnnnnnnnnnnnnnnnnnnnnnnnnnnnnnnnnnnnnnnnnnnnnnnnnnnnnnnnnnnnnnnnnnnnnnnnnnnnnnnnnnnnnnnnnnnnnnnnnnnnnnnnnnnnnnnnnnnnnnnnnnnnnnnnnnnnnnnnnnnnnnnnnnnnnnnnnnnnnnnnnnnnnnnnnnnnnnnnnnnnnnnnnnnnnnnnnnnnnnnnnnnnnnnnnnnnnnnnnnnnnnnnnnnnnnnnnnnnnnnnnnnnnnnnnnnnnnnnnnnnnnnnnnnnnnnnnnnnnnnnnnnnnnnnnnnnnnnnnnnnnnnnnnnnnnnnnnnnnnnnnnnnnnnnnnnnnnnnnnnnnnnnnnnnnnnnnnnnnnnnnnnnnnnnnnnnnnnnnnnnnnnnnnnnnnnnnnnnnnnnnnnnnnnnnnnnnnnnnnnnnnnnnnnnnnnnnnnnnnnnnnnnnnnnnnnnnnnnnnnnnnnnnnnnnnnnnnnnnnnnnnnnnnnnnnnnnnnnnnnnnnnnnnnnnnnnnnnnnnnnnnnnnnnnnnnnnnnnnnnnnnnnnnnnnnnnnnnnnnnnnnnnnnnnnnnnnnnnnnnnnnnnnnnnnnnnnnnnnnnnnnnnnnnnnnnnnnnnnnnnnnnnnnnnnnnnnnnnnnnnnnnnnnnnnnnnnnnnnnnnnnnnnnnnnnnnnnnnnnnnnnnnnnnnnnnnnnnnnnnnnnnnnnnnnnnnnnnnnnnnnnnnnnnnnnnnnnnnnnnnnnnnnnnnnnnnnnnnnnnnnnnnnnnnnnnnnnnnnnnnnnnnnnnnnnnnnnnnnnnnnnnnnnnnnnnnnnnnnnnnnnnnnnnnnnnnnnnnnnnnnnnnnnnnnnnnnnnnnnnnnnnnnnnnnnnnnnnnnnnnnnnnnnnnnnnnnnnnnnnnnnnnnnnnnnnnnnnnnnnnnnnnnnnnnnnnnnnnnnnnnnnnnnnnnnnnnnnnnnnnnnnnnnnnnnnnnnnnnnnnnnnnnnnnnnnnnnnnnnnnnnnnnnnnnnnnnnnnnnnnnnnnnnnnnnnnnnnnnnnnnnnnnnnnnnnnnnnnnnnnnnnnnnnnnnnnnnnnnnnnnnnnnnnnnnnnnnnnnnnnnnnnnnnnnnnnnnnnnnnnnnnnnnnnnnnnnnnnnnnnnnnnnnnnnnnnnnnnnnnnnnnnnnnnnnnnnnnnnnnnnnnnnnnnnnnnnnnnnnnnnnnnnnnnnnnnnnnnnnnnnnnnnnnnnnnnnnnnnnnnnnnnnnnnnnnnnnnnnnnnnnnnnnnnnnnnnnnnnnnnnnnnnnnnnnnnnnnnnnnnnnnnnnnnnnnnnnnnnnnnnnnnnnnnnnnnnnnnnnnnnnnnnnnnnnnnnnnnnnnnnnnnnnnnnnnnnnnnnnnnnnnnnnnnnnnnnnnnnnnnnnnnnnnnnnnnnnnnnnnnnnnnnnnnnnnnnnnnnnnnnnnnnnnnnnnnnnnnnnnnnnnnnnnnnnnnnnnnnnnnnnnnnnnnnnnnnnnnnnnnnnnnnnnnnnnnnnnnnnnnnnnnnnnnnnnnnnnnnnnnnnnnnnnnnnnnnnnnnnnnnnnnnnnnnnnnnnnnnnnnnnnnnnnnnnnnnnnnnnnnnnnnnnnnnnnnnnnnnnnnnnnnnnnnnnnnnnnnnnnnnnnnnnnnnnnnnnnnnnnnnnnnnnnnnnnnnnnnnnnnnnnnnnnnnnnnnnnnnnnnnnnnnnnnnnnnnnnnnnnnnnnnnnnnnnnnnnnnnnnnnnnnnnnnnnnnnnnnnnnnnnnnnnnnnnnnnnnnnnnnnnnnnnnnnnnnnnnnnnnnnnnnnnnnnnnnnnnnnnnnnnnnnnnnnnnnnnnnnnnnnnnnnnnnnnnnnnnnnnnnnnnnnnnnnnnnnnnnnnnnnnnnnnnnnnnnnnnnnnnnnnnnnnnnnnnnnnnnnnnnnnnnnnnnnnnnnnnnnnnnnnnnnnnnnnnnnnnnnnnnnnnnnnnnnnnnnnnnnnnnnnnnnnnnnnnnnnnnnnnnnnnnnnnnnnnnnnnnnnnnnnnnnnnnnnnnnnnnnnnnnnnnnnnnnnnnnnnnnnnnnnnnnnnnnnnnnnnnnnnnnnnnnnnnnnnnnnnnnnnnnnnnnnnnnnnnnnnnnnnnnnnnnnnnnnnnnnnnnnnnnnnnnnnnnnnnnnnnnnnnnnnnnnnnnnnnnnnnnnnnnnnnnnnnnnnnnnnnnnnnnnnnnnnnnnnnnnnnnnnnnnnnnnnnnnnnnnnnnnnnnnnnnnnnnnnnnnnnnnnnnnnnnnnnnnnnnnnnnnnnnnnnnnnnnnnnnnnnnnnnnnnnnnnnnnnnnnnnnnnnnnnnnnnnnnnnnnnnnnnnnnnnnnnnnnnnnnnnnnnnnnnnnnnnnnnnnnnnnnnnnnnnnnnnnnnnnnnnnnnnnnnnnnnnnnnnnnnnnnnnnnnnnnnnnnnnnnnnnnnnnnnnnnnnnnnnnnnnnnnnnnnnnnnnnnnnnnnnnnnnnnnnnnnnnnnnnnnnnnnnnnnnnnnnnnnnnnnnnnnnnnnnnnnnnnnnnnnnnnnnnnnnnnnnnnnnnnnnnnnnnnnnnnnnnnnnnnnnnnnnnnnnnnnnnnnnnnnnnnnnnnnnnnnnnnnnnnnnnnnnnnnnnnnnnnnnnnnnnnnnnnnnnnnnnnnnnnnnnnnnnnnnnnnnnnnnnnnnnnnnnnnnnnnnnnnnnnnnnnnnnnnnnnnnnnnnnnnnnnnnnnnnnnnnnnnnnnnnnnnnnnnnnnnnnnnnnnnnnnnnnnnnnnnnnnnnnnnnnnnnnnnnnnnnnnnnnnnnnnnnnnnnnnnnnnnnnnnnnnnnnnnnnnnnnnnnnnnnnnnnnnnnnnnnnnnnnnnnnnnnnnnnnnnnnnnnnnnnnnnnnnnnnnnnnnnnnnnnnnnnnnnnnnnnnnnnnnnnnnnnnnnnnnnnnnnnnnnnnnnnnnnnnnnnnnnnnnnnnnnnnnnnnnnnnnnnnnnnnnnnnnnnnnnnnnnnnnnnnnnnnnnnnnnnnnnnnnnnnnnnnnnnnnnnnnnnnnnnnnnnnnnnnnnnnnnnnnnnnnnnnnnnnnnnnnnnnnnnnnnnnnnnnnnnnnnnnnnnnnnnnnnnnnnnnnnnnnnnnnnnnnnnnnnnnnnnnnnnnnnnnnnnnnnnnnnnnnnnnnnnnnnnnnnnnnnnnnnnnnnnnnnnnnnnnnnnnnnnnnnnnnnnnnnnnnnnnnnnnnnnnnnnnnnnnnnnnnnnnnnnnnnnnnnnnnnnnnnnnnnnnnnnnnnnnnnnnnnnnnnnnnnnnnnnnnnnnnnnnnnnnnnnnnnnnnnnnnnnnnnnnnnnnnnnnnnnnnnnnnnnnnnnnnnnnnnnnnnnnnnnnnnnnnnnnnnnnnnnnnnnnnnnnnnnnnnnnnnnnnnnnnnnnnnnnnnnnnnnnnnnnnnnnnnnnnnnnnnnnnnnnnnnnnnnnnnnnnnnnnnnnnnnnnnnnnnnnnnnnnnnnnnnnnnnnnnnnnnnnnnnnnnnnnnnnnnnnnnnnnnnnnnnnnnnnnnnnnnnnnnnnnnnnnnnnnnnnnnnnnnnnnnnnnnnnnnnnnnnnnnnnnnnnnnnnnnnnnnnnnnnnnnnnnnnnnnnnnnnnnnnnnnnnnnnnnnnnnnnnnnnnnnnnnnnnnnnnnnnnnnnnnnnnnnnnnnnnnnnnnnnnnnnnnnnnnnnnnnnnnnnnnnnnnnnnnnnnnnnnnnnnnnnnnnnnnnnnnnnnnnnnnnnnnnnnnnnnnnnnnnnnnnnnnnnnnnnnnnnnnnnnnnnnnnnnnnnnnnnnnnnnnnnnnnnnnnnnnnnnnnnnnnnnnnnnnnnnnnnnnnnnnnnnnnnnnnnnnnnnnnnnnnnnnnnnnnnnnnnnnnnnnnnnnnnnnnnnnnnnnnnnnnnnnnnnnnnnnnnnnnnnnnnnnnnnnnnnnnnnnnnnnnnnnnnnnnnnnnnnnnnnnnnnnnnnnnnnnnnnnnnnnnnnnnnnnnnnnnnnnnnnnnnnnnnnnnnnnnnnnnnnnnnnnnnnnnnnnnnnnnnnnnnnnnnnnnnnnnnnnnnnnnnnnnnnnnnnnnnnnnnnnnnnnnnnnnnnnnnnnnnnnnnnnnnnnnnnnnnnnnnnnnnnnnnnnnnnnnnnnnnnnnnnnnnnnnnnnnnnnnnnnnnnnnnnnnnnnnnnnnnnnnnnnnnnnnnnnnnnnnnnnnnnnnnnnnnnnnnnnnnnnnnnnnnnnnnnnnnnnnnnnnnnnnnnnnnnnnnnnnnnnnnnnnnnnnnnnnnnnnnnnnnnnnnnnnnnnnnnnnnnnnnnnnnnnnnnnnnnnnnnnnnnnnnnnnnnnnnnnnnnnnnnnnnnnnnnnnnnnnnnnnnnnnnnnnnnnnnnnnnnnnnnnnnnnnnnnnnnnnnnnnnnnnnnnnnnnnnnnnnnnnnnnnnnnnnnnnnnnnnnnnnnnnnnnnnnnnnnnnnnnnnnnnnnnnnnnnnnnnnnnnnnnnnnnnnnnnnnnnnnnnnnnnnnnnnnnnnnnnnnnnnnnnnnnnnnnnnnnnnnnnnnnnnnnnnnnnnnnnnnnnnnnnnnnnnnnnnnnnnnnnnnnnnnnnnnnnnnnnnnnnnnnnnnnnnnnnnnnnnnnnnnnnnnnnnnnnnnnnnnnnnnnnnnnnnnnnnnnnnnnnnnnnnnnnnnnnnnnnnnnnnnnnnnnnnnnnnnnnnnnnnnnnnnnnnnnnnnnnnnnnnnnnnnnnnnnnnnnnnnnnnnnnnnnnnnnnnnnnnnnnnnnnnnnnnnnnnnnnnnnnnnnnnnnnnnnnnnnnnnnnnnnnnnnnnnnnnnnnnnnnnnnnnnnnnnnnnnnnnnnnnnnnnnnnnnnnnnnnnnnnnnnnnnnnnnnnnnnnnnnnnnnnnnnnnnnnnnnnnnnnnnnnnnnnnnnnnnnnnnnnnnnnnnnnnnnnnnnnnnnnnnnnnnnnnnnnnnnnnnnnnnnnnnnnnnnnnnnnnnnnnnnnnnnnnnnnnnnnnnnnnnnnnnnnnnnnnnnnnnnnnnnnnnnnnnnnnnnnnnnnnnnnnnnnnnnnnnnnnnnnnnnnnnnnnnnnnnnnnnnnnnnnnnnnnnnnnnnnnnnnnnnnnnnnnnnnnnnnnnnnnnnnnnnnnnnnnnnnnnnnnnnnnnnnnnnnnnnnnnnnnnnnnnnnnnnnnnnnnnnnnnnnnnnnnnnnnnnnnnnnnnnnnnnnnnnnnnnnnnnnnnnnnnnnnnnnnnnnnnnnnnnnnnnnnnnnnnnnnnnnnnnnnnnnnnnnnnnnnnnnnnnnnnnnnnnnnnnnnnnnnnnnnnnnnnnnnnnnnnnnnnnnnnnnnnnnnnnnnnnnnnnnnnnnnnnnnnnnnnnnnnnnnnnnnnnnnnnnnnnnnnnnnnnnnnnnnnnnnnnnnnnnnnnnnnnnnnnnnnnnnnnnnnnnnnnnnnnnnnnnnnnnnnnnnnnnnnnnnnnnnnnnnnnnnnnnnnnnnnnnnnnnnnnnnnnnnnnnnnnnnnnnnnnnnnnnnnnnnnnnnnnnnnnnnnnnnnnnnnnnnnnnnnnnnnnnnnnnnnnnnnnnnnnnnnnnnnnnnnnnnnnnnnnnnnnnnnnnnnnnnnnnnnnnnnnnnnnnnnnnnnnnnnnnnnnnnnnnnnnnnnnnnnnnnnnnnnnnnnnnnnnnnnnnnnnnnnnnnnnnnnnnnnnnnnnnnnnnnnnnnnnnnnnnnnnnnnnnnnnnnnnnnnnnnnnnnnnnnnnnnnnnnnnnnnnnnnnnnnnnnnnnnnnnnnnnnnnnnnnnnnnnnnnnnnnnnnnnnnnnnnnnnnnnnnnnnnnnnnnnnnnnnnnnnnnnnnnnnnnnnnnnnnnnnnnnnnnnnnnnnnnnnnnnnnnnnnnnnnnnnnnnnnnnnnnnnnnnnnnnnnnnnnnnnnnnnnnnnnnnnnnnnnnnnnnnnnnnnnnnnnnnnnnnnnnnnnnnnnnnnnnnnnnnnnnnnnnnnnnnnnnnnnnnnnnnnnnnnnnnnnnnnnnnnnnnnnnnnnnnnnnnnnnnnnnnnnnnnnnnnnnnnnnnnnnnnnnnnnnnnnnnnnnnnnnnnnnnnnnnnnnnnnnnnnnnnnnnnnnnnnnnnnnnnnnnnnnnnnnnnnnnnnnnnnnnnnnnnnnnnnnnnnnnnnnnnnnnnnnnnnnnnnnnnnnnnnnnnnnnnnnnnnnnnnnnnnnnnnnnnnnnnnnnnnnnnnnnnnnnnnnnnnnnnnnnnnnnnnnnnnnnnnnnnnnnnnnnnnnnnnnnnnnnnnnnnnnnnnnnnnnnnnnnnnnnnnnnnnnnnnnnnnnnnnnnnnnnnnnnnnnnnnnnnnnnnnnnnnnnnnnnnnnnnnnnnnnnnnnnnnnnnnnnnnnnnnnnnnnnnnnnnnnnnnnnnnnnnnnnnnnnnnnnnnnnnnnnnnnnnnnnnnnnnnnnnnnnnnnnnnnnnnnnnnnnnnnnnnnnnnnnnnnnnnnnnnnnnnnnnnnnnnnnnnnnnnnnnnnnnnnnnnnnnnnnnnnnnnnnnnnnnnnnnnnnnnnnnnnnnnnnnnnnnnnnnnnnnnnnnnnnnnnnnnnnnnnnnnnnnnnnnnnnnnnnnnnnnnnnnnnnnnnnnnnnnnnnnnnnnnnnnnnnnnnnnnnnnnnnnnnnnnnnnnnnnnnnnnnnnnnnnnnnnnnnnnnnnnnnnnnnnnnnnnnnnnnnnnnnnnnnnnnnnnnnnnnnnnnnnnnnnnnnnnnnnnnnnnnnnnnnnnnnnnnnnnnnnnnnnnnnnnnnnnnnnnnnnnnnnnnnnnnnnnnnnnnnnnnnnnnnnnnnnnnnnnnnnnnnnnnnnnnnnnnnnnnnnnnnnnnnnnnnnnnnnnnnnnnnnnnnnnnnnnnnnnnnnnnnnnnnnnnnnnnnnnnnnnnnnnnnnnnnnnnnnnnnnnnnnnnnnnnnnnnnnnnnnnnnnnnnnnnnnnnnnnnnnnnnnnnnnnnnnnnnnnnnnnnnnnnnnnnnnnnnnnnnnnnnnnnnnnnnnnnnnnnnnnnnnnnnnnnnnnnnnnnnnnnnnnnnnnnnnnnnnnnnnnnnnnnnnnnnnnnnnnnnnnnnnnnnnnnnnnnnnnnnnnnnnnnnnnnnnnnnnnnnnnnnnnnnnnnnnnnnnnnnnnnnnnnnnnnnnnnnnnnnnnnnnnnnnnnnnnnnnnnnnnnnnnnnnnnnnnnnnnnnnnnnnnnnnnnnnnnnnnnnnnnnnnnnnnnnnnnnnnnnnnnnnnnnnnnnnnnnnnnnnnnnnnnnnnnnnnnnnnnnnnnnnnnnnnnnnnnnnnnnnnnnnnnnnnnnnnnnnnnnnnnnnnnnnnnnnnnnnnnnnnnnnnnnnnnnnnnnnnnnnnnnnnnnnnnnnnnnnnnnnnnnnnnnnnnnnnnnnnnnnnnnnnnnnnnnnnnnnnnnnnnnnnnnnnnnnnnnnnnnnnnnnnnnnnnnnnnnnnnnnnnnnnnnnnnnnnnnnnnnnnnnnnnnnnnnnnnnnnnnnnnnnnnnnnnnnnnnnnnnnnnnnnnnnnnnnnnnnnnnnnnnnnnnnnnnnnnnnnnnnnnnnnnnnnnnnnnnnnnnnnnnnnnnnnnnnnnnnnnnnnnnnnnnnnnnnnnnnnnnnnnnnnnnnnnnnnnnnnnnnnnnnnnnnnnnnnnnnnnnnnnnnnnnnnnnnnnnnnnnnnnnnnnnnnnnnnnnnnnnnnnnnnnnnnnnnnnnnnnnnnnnnnnnnnnnnnnnnnnnnnnnnnnnnnnnnnnnnnnnnnnnnnnnnnnnnnnnnnnnnnnnnnnnnnnnnnnnnnnnnnnnnnnnnnnnnnnnnnnnnnnnnnnnnnnnnnnnnnnnnnnnnnnnnnnnnnnnnnnnnnnnnnnnnnnnnnnnnnnnnnnnnnnnnnnnnnnnnnnnnnnnnnnnnnnnnnnnnnnnnnnnnnnnnnnnnnnnnnnnnnnnnnnnnnnnnnnnnnnnnnnnnnnnnnnnnnnnnnnnnnnnnnnnnnnnnnnnnnnnnnnnnnnnnnnnnnnnnnnnnnnnnnnnnnnnnnnnnnnnnnnnnnnnnnnnnnnnnnnnnnnnnnnnnnnnnnnnnnnnnnnnnnnnnnnnnnnnnnnnnnnnnnnnnnnnnnnnnnnnnnnnnnnnnnnnnnnnnnnnnnnnnnnnnnnnnnnnnnnnnnnnnnnnnnnnnnnnnnnnnnnnnnnnnnnnnnnnnnnnnnnnnnnnnnnnnnnnnnnnnnnnnnnnnnnnnnnnnnnnnnnnnnnnnnnnnnnnnnnnnnnnnnnnnnnnnnnnnnnnnnnnnnnnnnnnnnnnnnnnnnnnnnnnnnnnnnnnnnnnnnnnnnnnnnnnnnnnnnnnnnnnnnnnnnnnnnnnnnnnnnnnnnnnnnnnnnnnnnnnnnnnnnnnnnnnnnnnnnnnnnnnnnnnnnnnnnnnnnnnnnnnnnnnnnnnnnnnnnnnnnnnnnnnnnnnnnnnnnnnnnnnnnnnnnnnnnnnnnnnnnnnnnnnnnnnnnnnnnnnnnnnnnnnnnnnnnnnnnnnnnnnnnnnnnnnnnnnnnnnnnnnnnnnnnnnnnnnnnnnnnnnnnnnnnnnnnnnnnnnnnnnnnnnnnnnnnnnnnnnnnnnnnnnnnnnnnnnnnnnnnnnnnnnnnnnnnnnnnnnnnnnnnnnnnnnnnnnnnnnnnnnnnnnnnnnnnnnnnnnnnnnnnnnnnnnnnnnnnnnnnnnnnnnnnnnnnnnnnnnnnnnnnnnnnnnnnnnnnnnnnnnnnnnnnnnnnnnnnnnnnnnnnnnnnnnnnnnnnnnnnnnnnnnnnnnnnnnnnnnnnnnnnnnnnnnnnnnnnnnnnnnnnnnnnnnnnnnnnnnnnnnnnnnnnnnnnnnnnnnnnnnnnnnnnnnnnnnnnnnnnnnnnnnnnnnnnnnnnnnnnnnnnnnnnnnnnnnnnnnnnnnnnnnnnnnnnnnnnnnnnnnnnnnnnnnnnnnnnnnnnnnnnnnnnnnnnnnnnnnnnnnnnnnnnnnnnnnnnnnnnnnnnnnnnnnnnnnnnnnnnnnnnnnnnnnnnnnnnnnnnnnnnnnnnnnnnnnnnnnnnnnnnnnnnnnnnnnnnnnnnnnnnnnnnnnnnnnnnnnnnnnnnnnnnnnnnnnnnnnnnnnnnnnnnnnnnnnnnnnnnnnnnnnnnnnnnnnnnnnnnnnnnnnnnnnnnnnnnnnnnnnnnnnnnnnnnnnnnnnnnnnnnnnnnnnnnnnnnnnnnnnnnnnnnnnnnnnnnnnnnnnnnnnnnnnnnnnnnnnnnnnnnnnnnnnnnnnnnnnnnnnnnnnnnnnnnnnnnnnnnnnnnnnnnnnnnnnnnnnnnnnnnnnnnnnnnnnnnnnnnnnnnnnnnnnnnnnnnnnnnnnnnnnnnnnnnnnnnnnnnnnnnnnnnnnnnnnnnnnnnnnnnnnnnnnnnnnnnnnnnnnnnnnnnnnnnnnnnnnnnnnnnnnnnnnnnnnnnnnnnnnnnnnnnnnnnnnnnnnnnnnnnnnnnnnnnnnnnnnnnnnnnnnnnnnnnnnnnnnnnnnnnnnnnnnnnnnnnnnnnnnnnnnnnnnnnnnnnnnnnnnnnnnnnnnnnnnnnnnnnnnnnnnnnnnnnnnnnnnnnnnnnnnnnnnnnnnnnnnnnnnnnnnnnnnnnnnnnnnnnnnnnnnnnnnnnnnnnnnnnnnnnnnnnnnnnnnnnnnnnnnnnnnnnnnnnnnnnnnnnnnnnnnnnnnnnnnnnnnnnnnnnnnnnnnnnnnnnnnnnnnnnnnnnnnnnnnnnnnnnnnnnnnnnnnnnnnnnnnnnnnnnnnnnnnnnnnnnnnnnnnnnnnnnnnnnnnnnnnnnnnnnnnnnnnnnnnnnnnnnnnnnnnnnnnnnnnnnnnnnnnnnnnnnnnnnnnnnnnnnnnnnnnnnnnnnnnnnnnnnnnnnnnnnnnnnnnnnnnnnnnnnnnnnnnnnnnnnnnnnnnnnnnnnnnnnnnnnnnnnnnnnnnnnnnnnnnnnnnnnnnnnnnnnnnnnnnnnnnnnnnnnnnnnnnnnnnnnnnnnnnnnnnnnnnnnnnnnnnnnnnnnnnnnnnnnnnnnnnnnnnnnnnnnnnnnnnnnnnnnnnnnnnnnnnnnnnnnnnnnnnnnnnnnnnnnnnnnnnnnnnnnnnnnnnnnnnnnnnnnnnnnnnnnnnnnnnnnnnnnnnnnnnnnnnnnnnnnnnnnnnnnnnnnnnnnnnnnnnnnnnnnnnnnnnnnnnnnnnnnnnnnnnnnnnnnnnnnnnnnnnnnnnnnnnnnnnnnnnnnnnnnnnnnnnnnnnnnnnnnnnnnnnnnnnnnnnnnnnnnnnnnnnnnnnnnnnnnnnnnnnnnnnnnnnnnnnnnnnnnnnnnnnnnnnnnnnnnnnnnnnnnnnnnnnnnnnnnnnnnnnnnnnnnnnnnnnnnnnnnnnnnnnnnnnnnnnnnnnnnnnnnnnnnnnnnnnnnnnnnnnnnnnnnnnnnnnnnnnnnnnnnnnnnnnnnnnnnnnnnnnnnnnnnnnnnnnnnnnnnnnnnnnnnnnnnnnnnnnnnnnnnnnnnnnnnnnnnnnnnnnnnnnnnnnnnnnnnnnnnnnnnnnnnnnnnnnnnnnnnnnnnnnnnnnnnnnnnnnnnnnnnnnnnnnnnnnnnnnnnnnnnnnnnnnnnnnnnnnnnnnnnnnnnnnnnnnnnnnnnnnnnnnnnnnnnnnnnnnnnnnnnnnnnnnnnnnnnnnnnnnnnnnnnnnnnnnnnnnnnnnnnnnnnnnnnnnnnnnnnnnnnnnnnnnnnnnnnnnnnnnnnnnnnnnnnnnnnnnnnnnnnnnnnnnnnnnnnnnnnnnnnnnnnnnnnnnnnnnnnnnnnnnnnnnnnnnnnnnnnnnnnnnnnnnnnnnnnnnnnnnnnnnnnnnnnnnnnnnnnnnnnnnnnnnnnnnnnnnnnnnnnnnnnnnnnnnnnnnnnnnnnnnnnnnnnnnnnnnnnnnnnnnnnnnnnnnnnnnnnnnnnnnnnnnnnnnnnnnnnnnnnnnnnnnnnnnnnnnnnnnnnnnnnnnnnnnnnnnnnnnnnnnnnnnnnnnnnnnnnnnnnnnnnnnnnnnnnnnnnnnnnnnnnnnnnnnnnnnnnnnnnnnnnnnnnnnnnnnnnnnnnnnnnnnnnnnnnnnnnnnnnnnnnnnnnnnnnnnnnnnnnnnnnnnnnnnnnnnnnnnnnnnnnnnnnnnnnnnnnnnnnnnnnnnnnnnnnnnnnnnnnnnnnnnnnnnnnnnnnnnnnnnnnnnnnnnnnnnnnnnnnnnnnnnnnnnnnnnnnnnnnnnnnnnnnnnnnnnnnnnnnnnnnnnnnnnnnnnnnnnnnnnnnnnnnnnnnnnnnnnnnnnnnnnnnnnnnnnnnnnnnnnnnnnnnnnnnnnnnnnnnnnnnnnnnnnnnnnnnnnnnnnnnnnnnnnnnnnnnnnnnnnnnnnnnnnnnnnnnnnnnnnnnnnnnnnnnnnnnnnnnnnnnnnnnnnnnnnnnnnnnnnnnnnnnnnnnnnnnnnnnnnnnnnnnnnnnnnnnnnnnnnnnnnnnnnnnnnnnnnnnnnnnnnnnnnnnnnnnnnnnnnnnnnnnnnnnnnnnnnnnnnnnnnnnnnnnnnnnnnnnnnnnnnnnnnnnnnnnnnnnnnnnnnnnnnnnnnnnnnnnnnnnnnnnnnnnnnnnnnnnnnnnnnnnnnnnnnnnnnnnnnnnnnnnnnnnnnnnnnnnnnnnnnnnnnnnnnnnnnnnnnnnnnnnnnnnnnnnnnnnnnnnnnnnnnnnnnnnnnnnnnnnnnnnnnnnnnnnnnnnnnnnnnnnnnnnnnnnnnnnnnnnnnnnnnnnnnnnnnnnnnnnnnnnnnnnnnnnnnnnnnnnnnnnnnnnnnnnnnnnnnnnnnnnnnnnnnnnnnnnnnnnnnnnnnnnnnnnnnnnnnnnnnnnnnnnnnnnnnnnnnnnnnnnnnnnnnnnnnnnnnnnnnnnnnnnnnnnnnnnnnnnnnnnnnnnnnnnnnnnnnnnnnnnnnnnnnnnnnnnnnnnnnnnnnnnnnnnnnnnnnnnnnnnnnnnnnnnnnnnnnnnnnnnnnnnnnnnnnnnnnnnnnnnnnnnnnnnnnnnnnnnnnnnnnnnnnnnnnnnnnnnnnnnnnnnnnnnnnnnnnnnnnnnnnnnnnnnnnnnnnnnnnnnnnnnnnnnnnnnnnnnnnnnnnnnnnnnnnnnnnnnnnnnnnnnnnnnnnnnnnnnnnnnnnnnnnnnnnnnnnnnnnnnnnnnnnnnnnnnnnnnnnnnnnnnnnnnnnnnnnnnnnnnnnnnnnnnnnnnnnnnnnnnnnnnnnnnnnnnnnnnnnnnnnnnnnnnnnnnnnnnnnnnnnnnnnnnnnnnnnnnnnnnnnnnnnnnnnnnnnnnnnnnnnnnnnnnnnnnnnnnnnnnnnnnnnnnnnnnnnnnnnnnnnnnnnnnnnnnnnnnnnnnnnnnnnnnnnnnnnnnnnnnnnnnnnnnnnnnnnnnnnnnnnnnnnnnnnnnnnnnnnnnnnnnnnnnnnnnnnnnnnnnnnnnnnnnnnnnnnnnnnnnnnnnnnnnnnnnnnnnnnnnnnnnnnnnnnnnnnnnnnnnnnnnnnnnnnnnnnnnnnnnnnnnnnnnnnnnnnnnnnnnnnnnnnnnnnnnnnnnnnnnnnnnnnnnnnnnnnnnnnnnnnnnnnnnnnnnnnnnnnnnnnnnnnnnnnnnnnnnnnnnnnnnnnnnnnnnnnnnnnnnnnnnnnnnnnnnnnnnnnnnnnnnnnnnnnnnnnnnnnnnnnnnnnnnnnnnnnnnnnnnnnnnnnnnnnnnnnnnnnnnnnnnnnnnnnnnnnnnnnnnnnnnnnnnnnnnnnnnnnnnnnnnnnnnnnnnnnnnnnnnnnnnnnnnnnnnnnnnnnnnnnnnnnnnnnnnnnnnnnnnnnnnnnnnnnnnnnnnnnnnnnnnnnnnnnnnnnnnnnnnnnnnnnnnnnnnnnnnnnnnnnnnnnnnnnnnnnnnnnnnnnnnnnnnnnnnnnnnnnnnnnnnnnnnnnnnnnnnnnnnnnnnnnnnnnnnnnnnnnnnnnnnnnnnnnnnnnnnnnnnnnnnnnnnnnnnnnnnnnnnnnnnnnnnnnnnnnnnnnnnnnnnnnnnnnnnnnnnnnnnnnnnnnnnnnnnnnnnnnnnnnnnnnnnnnnnnnnnnnnnnnnnnnnnnnnnnnnnnnnnnnnnnnnnnnnnnnnnnnnnnnnnnnnnnnnnnnnnnnnnnnnnnnnnnnnnnnnnnnnnnnnnnnnnnnnnnnnnnnnnnnnnnnnnnnnnnnnnnnnnnnnnnnnnnnnnnnnnnnnnnnnnnnnnnnnnnnnnnnnnnnnnnnnnnnnnnnnnnnnnnnnnnnnnnnnnnnnnnnnnnnnnnnnnnnnnnnnnnnnnnnnnnnnnnnnnnnnnnnnnnnnnnnnnnnnnnnnnnnnnnnnnnnnnnnnnnnnnnnnnnnnnnnnnnnnnnnnnnnnnnnnnnnnnnnnnnnnnnnnnnnnnnnnnnnnnnnnnnnnnnnnnnnnnnnnnnnnnnnnnnnnnnnnnnnnnnnnnnnnnnnnnnnnnnnnnnnnnnnnnnnnnnnnnnnnnnnnnnnnnnnnnnnnnnnnnnnnnnnnnnnnnnnnnnnnnnnnnnnnnnnnnnnnnnnnnnnnnnnnnnnnnnnnnnnnnnnnnnnnnnnnnnnnnnnnnnnnnnnnnnnnnnnnnnnnnnnnnnnnnnnnnnnnnnnnnnnnnnnnnnnnnnnnnnnnnnnnnnnnnnnnnnnnnnnnnnnnnnnnnnnnnnnnnnnnnnnnnnnnnnnnnnnnnnnnnnnnnnnnnnnnnnnnnnnnnnnnnnnnnnnnnnnnnnnnnnnnnnnnnnnnnnnnnnnnnnnnnnnnnnnnnnnnnnnnnnnnnnnnnnnnnnnnnnnnnnnnnnnnnnnnnnnnnnnnnnnnnnnnnnnnnnnnnnnnnnnnnnnnnnnnnnnnnnnnnnnnnnnnnnnnnnnnnnnnnnnnnnnnnnnnnnnnnnnnnnnnnnnnnnnnnnnnnnnnnnnnnnnnnnnnnnnnnnnnnnnnnnnnnnnnnnnnnnnnnnnnnnnnnnnnnnnnnnnnnnnnnnnnnnnnnnnnnnnnnnnnnnnnnnnnnnnnnnnnnnnnnnnnnnnnnnnnnnnnnnnnnnnnnnnnnnnnnnnnnnnnnnnnnnnnnnnnnnnnnnnnnnnnnnnnnnnnnnnnnnnnnnnnnnnnnnnnnnnnnnnnnnnnnnnnnnnnnnnnnnnnnnnnnnnnnnnnnnnnnnnnnnnnnnnnnnnnnnnnnnnnnnnnnnnnnnnnnnnnnnnnnnnnnnnnnnnnnnnnnnnnnnnnnnnnnnnnnnnnnnnnnnnnnnnnnnnnnnnnnnnnnnnnnnnnnnnnnnnnnnnnnnnnnnnnnnnnnnnnnnnnnnnnnnnnnnnnnnnnnnnnnnnnnnnnnnnnnnnnnnnnnnnnnnnnnnnnnnnnnnnnnnnnnnnnnnnnnnnnnnnnnnnnnnnnnnnnnnnnnnnnnnnnnnnnnnnnnnnnnnnnnnnnnnnnnnnnnnnnnnnnnnnnnnnnnnnnnnnnnnnnnnnnnnnnnnnnnnnnnnnnnnnnnnnnnnnnnnnnnnnnnnnnnnnnnnnnnnnnnnnnnnnnnnnnnnnnnnnnnnnnnnnnnnnnnnnnnnnnnnnnnnnnnnnnnnnnnnnnnnnnnnnnnnnnnnnnnnnnnnnnnnnnnnnnnnnnnnnnnnnnnnnnnnnnnnnnnnnnnnnnnnnnnnnnnnnnnnnnnnnnnnnnnnnnnnnnnnnnnnnnnnnnnnnnnnnnnnnnnnnnnnnnnnnnnnnnnnnnnnnnnnnnnnnnnnnnnnnnnnnnnnnnnnnnnnnnnnnnnnnnnnnnnnnnnnnnnnnnnnnnnnnnnnnnnnnnnnnnnnnnnnnnnnnnnnnnnnnnnnnnnnnnnnnnnnnnnnnnnnnnnnnnnnnnnnnnnnnnnnnnnnnnnnnnnnnnnnnnnnnnnnnnnnnnnnnnnnnnnnnnnnnnnnnnnnnnnnnnnnnnnnnnnnnnnnnnnnnnnnnnnnnnnnnnnnnnnnnnnnnnnnnnnnnnnnnnnnnnnnnnnnnnnnnnnnnnnnnnnnnnnnnnnnnnnnnnnnnnnnnnnnnnnnnnnnnnnnnnnnnnnnnnnnnnnnnnnnnnnnnnnnnnnnnnnnnnnnnnnnnnnnnnnnnnnnnnnnnnnnnnnnnnnnnnnnnnnnnnnnnnnnnnnnnnnnnnnnnnnnnnnnnnnnnnnnnnnnnnnnnnnnnnnnnnnnnnnnnnnnnnnnnnnnnnnnnnnnnnnnnnnnnnnnnnnnnnnnnnnnnnnnnnnnnnnnnnnnnnnnnnnnnnnnnnnnnnnnnnnnnnnnnnnnnnnnnnnnnnnnnnnnnnnnnnnnnnnnnnnnnnnnnnnnnnnnnnnnnnnnnnnnnnnnnnnnnnnnnnnnnnnnnnnnnnnnnnnnnnnnnnnnnnnnnnnnnnnnnnnnnnnnnnnnnnnnnnnnnnnnnnnnnnnnnnnnnnnnnnnnnnnnnnnnnnnnnnnnnnnnnnnnnnnnnnnnnnnnnnnnnnnnnnnnnnnnnnnnnnnnnnnnnnnnnnnnnnnnnnnnnnnnnnnnnnnnnnnnnnnnnnnnnnnnnnnnnnnnnnnnnnnnnnnnnnnnnnnnnnnnnnnnnnnnnnnnnnnnnnnnnnnnnnnnnnnnnnnnnnnnnnnnnnnnnnnnnnnnnnnnnnnnnnnnnnnnnnnnnnnnnnnnnnnnnnnnnnnnnnnnnnnnnnnnnnnnnnnnnnnnnnnnnnnnnnnnnnnnnnnnnnnnnnnnnnnnnnnnnnnnnnnnnnnnnnnnnnnnnnnnnnnnnnnnnnnnnnnnnnnnnnnnnnnnnnnnnnnnnnnnnnnnnnnnnnnnnnnnnnnnnnnnnnnnnnnnnnnnnnnnnnnnnnnnnnnnnnnnnnnnnnnnnnnnnnnnnnnnnnnnnnnnnnnnnnnnnnnnnnnnnnnnnnnnnnnnnnnnnnnnnnnnnnnnnnnnnnnnnnnnnnnnnnnnnnnnnnnnnnnnnnnnnnnnnnnnnnnnnnnnnnnnnnnnnnnnnnnnnnnnnnnnnnnnnnnnnnnnnnnnnnnnnnnnnnnnnnnnnnnnnnnnnnnnnnnnnnnnnnnnnnnnnnnnnnnnnnnnnnnnnnnnnnnnnnnnnnnnnnnnnnnnnnnnnnnnnnnnnnnnnnnnnnnnnnnnnnnnnnnnnnnnnnnnnnnnnnnnnnnnnnnnnnnnnnnnnnnnnnnnnnnnnnnnnnnnnnnnnnnnnnnnnnnnnnnnnnnnnnnnnnnnnnnnnnnnnnnnnnnnnnnnnnnnnnnnnnnnnnnnnnnnnnnnnnnnnnnnnnnnnnnnnnnnnnnnnnnnnnnnnnnnnnnnnnnnnnnnnnnnnnnnnnnnnnnnnnnnnnnnnnnnnnnnnnnnnnnnnnnnnnnnnnnnnnnnnnnnnnnnnnnnnnnnnnnnnnnnnnnnnnnnnnnnnnnnnnnnnnnnnnnnnnnnnnnnnnnnnnnnnnnnnnnnnnnnnnnnnnnnnnnnnnnnnnnnnnnnnnnnnnnnnnnnnnnnnnnnnnnnnnnnnnnnnnnnnnnnnnnnnnnnnnnnnnnnnnnnnnnnnnnnnnnnnnnnnnnnnnnnnnnnnnnnnnnnnnnnnnnnnnnnnnnnnnnnnnnnnnnnnnnnnnnnnnnnnnnnnnnnnnnnnnnnnnnnnnnnnnnnnnnnnnnnnnnnnnnnnnnnnnnnnnnnnnnnnnnnnnnnnnnnnnnnnnnnnnnnnnnnnnnnnnnnnnnnnnnnnnnnnnnnnnnnnnnnnnnnnnnnnnnnnnnnnnnnnnnnnnnnnnnnnnnnnnnnnnnnnnnnnnnnnnnnnnnnnnnnnnnnnnnnnnnnnnnnnnnnnnnnnnnnnnnnnnnnnnnnnnnnnnnnnnnnnnnnnnnnnnnnnnnnnnnnnnnnnnnnnnnnnnnnnnnnnnnnnnnnnnnnnnnnnnnnnnnnnnnnnnnnnnnnnnnnnnnnnnnnnnnnnnnnnnnnnnnnnnnnnnnnnnnnnnnnnnnnnnnnnnnnnnnnnnnnnnnnnnnnnnnnnnnnnnnnnnnnnnnnnnnnnnnnnnnnnnnnnnnnnnnnnnnnnnnnnnnnnnnnnnnnnnnnnnnnnnnnnnnnnnnnnnnnnnnnnnnnnnnnnnnnnnnnnnnnnnnnnnnnnnnnnnnnnnnnnnnnnnnnnnnnnnnnnnnnnnnnnnnnnnnnnnnnnnnnnnnnnnnnnnnnnnnnnnnnnnnnnnnnnnnnnnnnnnnnnnnnnnnnnnnnnnnnnnnnnnnnnnnnnnnnnnnnnnnnnnnnnnnnnnnnnnnnnnnnnnnnnnnnnnnnnnnnnnnnnnnnnnnnnnnnnnnnnnnnnnnnnnnnnnnnnnnnnnnnnnnnnnnnnnnnnnnnnnnnnnnnnnnnnnnnnnnnnnnnnnnnnnnnnnnnnnnnnnnnnnnnnnnnnnnnnnnnnnnnnnnnnnnnnnnnnnnnnnnnnnnnnnnnnnnnnnnnnnnnnnnnnnnnnnnnnnnnnnnnnnnnnnnnnnnnnnnnnnnnnnnnnnnnnnnnnnnnnnnnnnnnnnnnnnnnnnnnnnnnnnnnnnnnnnnnnnnnnnnnnnnnnnnnnnnnnnnnnnnnnnnnnnnnnnnnnnnnnnnnnnnnnnnnnnnnnnnnnnnnnnnnnnnnnnnnnnnnnnnnnnnnnnnnnnnnnnnnnnnnnnnnnnnnnnnnnnnnnnnnnnnnnnnnnnnnnnnnnnnnnnnnnnnnnnnnnnnnnnnnnnnnnnnnnnnnnnnnnnnnnnnnnnnnnnnnnnnnnnnnnnnnnnnnnnnnnnnnnnnnnnnnnnnnnnnnnnnnnnnnnnnnnnnnnnnnnnnnnnnnnnnnnnnnnnnnnnnnnnnnnnnnnnnnnnnnnnnnnnnnnnnnnnnnnnnnnnnnnnnnnnnnnnnnnnnnnnnnnnnnnnnnnnnnnnnnnnnnnnnnnnnnnnnnnnnnnnnnnnnnnnnnnnnnnnnnnnnnnnnnnnnnnnnnnnnnnnnnnnnnnnnnnnnnnnnnnnnnnnnnnnnnnnnnnnnnnnnnnnnnnnnnnnnnnnnnnnnnnnnnnnnnnnnnnnnnnnnnnnnnnnnnnnnnnnnnnnnnnnnnnnnnnnnnnnnnnnnnnnnnnnnnnnnnnnnnnnnnnnnnnnnnnnnnnnnnnnnnnnnnnnnnnnnnnnnnnnnnnnnnnnnnnnnnnnnnnnnnnnnnnnnnnnnnnnnnnnnnnnnnnnnnnnnnnnnnnnnnnnnnnnnnnnnnnnnnnnnnnnnnnnnnnnnnnnnnnnnnnnnnnnnnnnnnnnnnnnnnnnnnnnnnnnnnnnnnnnnnnnnnnnnnnnnnnnnnnnnnnnnnnnnnnnnnnnnnnnnnnnnnnnnnnnnnnnnnnnnnnnnnnnnnnnnnnnnnnnnnnnnnnnnnnnnnnnnnnnnnnnnnnnnnnnnnnnnnnnnnnnnnnnnnnnnnnnnnnnnnnnnnnnnnnnnnnnnnnnnnnnnnnnnnnnnnnnnnnnnnnnnnnnnnnnnnnnnnnnnnnnnnnnnnnnnnnnnnnnnnnnnnnnnnnnnnnnnnnnnnnnnnnnnnnnnnnnnnnnnnnnnnnnnnnnnnnnnnnnnnnnnnnnnnnnnnnnnnnnnnnnnnnnnnnnnnnnnnnnnnnnnnnnnnnnnnnnnnnnnnnnnnnnnnnnnnnnnnnnnnnnnnnnnnnnnnnnnnnnnnnnnnnnnnnnnnnnnnnnnnnnnnnnnnnnnnnnnnnnnnnnnnnnnnnnnnnnnnnnnnnnnnnnnnnnnnnnnnnnnnnnnnnnnnnnnnnnnnnnnnnnnnnnnnnnnnnnnnnnnnnnnnnnnnnnnnnnnnnnnnnnnnnnnnnnnnnnnnnnnnnnnnnnnnnnnnnnnnnnnnnnnnnnnnnnnnnnnnnnnnnnnnnnnnnnnnnnnnnnnnnnnnnnnnnnnnnnnnnnnnnnnnnnnnnnnnnnnnnnnnnnnnnnnnnnnnnnnnnnnnnnnnnnnnnnnnnnnnnnnnnnnnnnnnnnnnnnnnnnnnnnnnnnnnnnnnnnnnnnnnnnnnnnnnnnnnnnnnnnnnnnnnnnnnnnnnnnnnnnnnnnnnnnnnnnnnnnnnnnnnnnnnnnnnnnnnnnnnnnnnnnnnnnnnnnnnnnnnnnnnnnnnnnnnnnnnnnnnnnnnnnnnnnnnnnnnnnnnnnnnnnnnnnnnnnnnnnnnnnnnnnnnnnnnnnnnnnnnnnnnnnnnnnnnnnnnnnnnnnnnnnnnnnnnnnnnnnnnnnnnnnnnnnnnnnnnnnnnnnnnnnnnnnnnnnnnnnnnnnnnnnnnnnnnnnnnnnnnnnnnnnnnnnnnnnnnnnnnnnnnnnnnnnnnnnnnnnnnnnnnnnnnnnnnnnnnnnnnnnnnnnnnnnnnnnnnnnnnnnnnnnnnnnnnnnnnnnnnnnnnnnnnnnnnnnnnnnnnnnnnnnnnnnnnnnnnnnnnnnnnnnnnnnnnnnnnnnnnnnnnnnnnnnnnnnnnnnnnnnnnnnnnnnnnnnnnnnnnnnnnnnnnnnnnnnnnnnnnnnnnnnnnnnnnnnnnnnnnnnnnnnnnnnnnnnnnnnnnnnnnnnnnnnnnnnnnnnnnnnnnnnnnnnnnnnnnnnnnnnnnnnnnnnnnnnnnnnnnnnnnnnnnnnnnnnnnnnnnnnnnnnnnnnnnnnnnnnnnnnnnnnnnnnnnnnnnnnnnnnnnnnnnnnnnnnnnnnnnnnnnnnnnnnnnnnnnnnnnnnnnnnnnnnnnnnnnnnnnnnnnnnnnnnnnnnnnnnnnnnnnnnnnnnnnnnnnnnnnnnnnnnnnnnnnnnnnnnnnnnnnnnnnnnnnnnnnnnnnnnnnnnnnnnnnnnnnnnnnnnnnnnnnnnnnnnnnnnnnnnnnnnnnnnnnnnnnnnnnnnnnnnnnnnnnnnnnnnnnnnnnnnnnnnnnnnnnnnnnnnnnnnnnnnnnnnnnnnnnnnnnnnnnnnnnnnnnnnnnnnnnnnnnnnnnnnnnnnnnnnnnnnnnnnnnnnnnnnnnnnnnnnnnnnnnnnnnnnnnnnnnnnnnnnnnnnnnnnnnnnnnnnnnnnnnnnnnnnnnnnnnnnnnnnnnnnnnnnnnnnnnnnnnnnnnnnnnnnnnnnnnnnnnnnnnnnnnnnnnnnnnnnnnnnnnnnnnnnnnnnnnnnnnnnnnnnnnnnnnnnnnnnnnnnnnnnnnnnnnnnnnnnnnnnnnnnnnnnnnnnnnnnnnnnnnnnnnnnnnnnnnnnnnnnnnnnnnnnnnnnnnnnnnnnnnnnnnnnnnnnnnnnnnnnnnnnnnnnnnnnnnnnnnnnnnnnnnnnnnnnnnnnnnnnnnnnnnnnnnnnnnnnnnnnnnnnnnnnnnnnnnnnnnnnnnnnnnnnnnnnnnnnnnnnnnnnnnnnnnnnnnnnnnnnnnnnnnnnnnnnnnnnnnnnnnnnnnnnnnnnnnnnnnnnnnnnnnnnnnnnnnnnnnnnnnnnnnnnnnnnnnnnnnnnnnnnnnnnnnnnnnnnnnnnnnnnnnnnnnnnnnnnnnnnnnnnnnnnnnnnnnnnnnnnnnnnnnnnnnnnnnnnnnnnnnnnnnnnnnnnnnnnnnnnnnnnnnnnnnnnnnnnnnnnnnnnnnnnnnnnnnnnnnnnnnnnnnnnnnnnnnnnnnnnnnnnnnnnnnnnnnnnnnnnnnnnnnnnnnnnnnnnnnnnnnnnnnnnnnnnnnnnnnnnnnnnnnnnnnnnnnnnnnnnnnnnnnnnnnnnnnnnnnnnnnnnnnnnnnnnnnnnnnnnnnnnnnnnnnnnnnnnnnnnnnnnnnnnnnnnnnnnnnnnnnnnnnnnnnnnnnnnnnnnnnnnnnnnnnnnnnnnnnnnnnnnnnnnnnnnnnnnnnnnnnnnnnnnnnnnnnnnnnnnnnnnnnnnnnnnnnnnnnnnnnnnnnnnnnnnnnnnnnnnnnnnnnnnnnnnnnnnnnnnnnnnnnnnnnnnnnnnnnnnnnnnnnnnnnnnnnnnnnnnnnnnnnnnnnnnnnnnnnnnnnnnnnnnnnnnnnnnnnnnnnnnnnnnnnnnnnnnnnnnnnnnnnnnnnnnnnnnnnnnnnnnnnnnnnnnnnnnnnnnnnnnnnnnnnnnnnnnnnnnnnnnnnnnnnnnnnnnnnnnnnnnnnnnnnnnnnnnnnnnnnnnnnnnnnnnnnnnnnnnnnnnnnnnnnnnnnnnnnnnnnnnnnnnnnnnnnnnnnnnnnnnnnnnnnnnnnnnnnnnnnnnnnnnnnnnnnnnnnnnnnnnnnnnnnnnnnnnnnnnnnnnnnnnnnnnnnnnnnnnnnnnnnnnnnnnnnnnnnnnnnnnnnnnnnnnnnnnnnnnnnnnnnnnnnnnnnnnnnnnnnnnnnnnnnnnnnnnnnnnnnnnnnnnnnnnnnnnnnnnnnnnnnnnnnnnnnnnnnnnnnnnnnnnnnnnnnnnnnnnnnnnnnnnnnnnnnnnnnnnnnnnnnnnnnnnnnnnnnnnnnnnnnnnnnnnnnnnnnnnnnnnnnnnnnnnnnnnnnnnnnnnnnnnnnnnnnnnnnnnnnnnnnnnnnnnnnnnnnnnnnnnnnnnnnnnnnnnnnnnnnnnnnnnnnnnnnnnnnnnnnnnnnnnnnnnnnnnnnnnnnnnnnnnnnnnnnnnnnnnnnnnnnnnnnnnnnnnnnnnnnnnnnnnnnnnnnnnnnnnnnnnnnnnnnnnnnnnnnnnnnnnnnnnnnnnnnnnnnnnnnnnnnnnnnnnnnnnnnnnnnnnnnnnnnnnnnnnnnnnnnnnnnnnnnnnnnnnnnnnnnnnnnnnnnnnnnnnnnnnnnnnnnnnnnnnnnnnnnnnnnnnnnnnnnnnnnnnnnnnnnnnnnnnnnnnnnnnnnnnnnnnnnnnnnnnnnnnnnnnnnnnnnnnnnnnnnnnnnnnnnnnnnnnnnnnnnnnnnnnnnnnnnnnnnnnnnnnnnnnnnnnnnnnnnnnnnnnnnnnnnnnnnnnnnnnnnnnnnnnnnnnnnnnnnnnnnnnnnnnnnnnnnnnnnnnnnnnnnnnnnnnnnnnnnnnnnnnnnnnnnnnnnnnnnnnnnnnnnnnnnnnnnnnnnnnnnnnnnnnnnnnnnnnnnnnnnnnnnnnnnnnnnnnnnnnnnnnnnnnnnnnnnnnnnnnnnnnnnnnnnnnnnnnnnnnnnnnnnnnnnnnnnnnnnnnnnnnnnnnnnnnnnnnnnnnnnnnnnnnnnnnnnnnnnnnnnnnnnnnnnnnnnnnnnnnnnnnnnnnnnnnnnnnnnnnnnnnnnnnnnnnnnnnnnnnnnnnnnnnnnnnnnnnnnnnnnnnnnnnnnnnnnnnnnnnnnnnnnnnnnnnnnnnnnnnnnnnnnnnnnnnnnnnnnnnnnnnnnnnnnnnnnnnnnnnnnnnnnnnnnnnnnnnnnnnnnnnnnnnnnnnnnnnnnnnnnnnnnnnnnnnnnnnnnnnnnnnnnnnnnnnnnnnnnnnnnnnnnnnnnnnnnnnnnnnnnnnnnnnnnnnnnnnnnnnnnnnnnnnnnnnnnnnnnnnnnnnnnnnnnnnnnnnnnnnnnnnnnnnnnnnnnnnnnnnnnnnnnnnnnnnnnnnnnnnnnnnnnnnnnnnnnnnnnnnnnnnnnnnnnnnnnnnnnnnnnnnnnnnnnnnnnnnnnnnnnnnnnnnnnnnnnnnnnnnnnnnnnnnnnnnnnnnnnnnnnnnnnnnnnnnnnnnnnnnnnnnnnnnnnnnnnnnnnnnnnnnnnnnnnnnnnnnnnnnnnnnnnnnnnnnnnnnnnnnnnnnnnnnnnnnnnnnnnnnnnnnnnnnnnnnnnnnnnnnnnnnnnnnnnnnnnnnnnnnnnnnnnnnnnnnnnnnnnnnnnnnnnnnnnnnnnnnnnnnnnnnnnnnnnnnnnnnnnnnnnnnnnnnnnnnnnnnnnnnnnnnnnnnnnnnnnnnnnnnnnnnnnnnnnnnnnnnnnnnnnnnnnnnnnnnnnnnnnnnnnnnnnnnnnnnnnnnnnnnnnnnnnnnnnnnnnnnnnnnnnnnnnnnnnnnnnnnnnnnnnnnnnnnnnnnnnnnnnnnnnnnnnnnnnnnnnnnnnnnnnnnnnnnnnnnnnnnnnnnnnnnnnnnnnnnnnnnnnnnnnnnnnnnnnnnnnnnnnnnnnnnnnnnnnnnnnnnnnnnnnnnnnnnnnnnnnnnnnnnnnnnnnnnnnnnnnnnnnnnnnnnnnnnnnnnnnnnnnnnnnnnnnnnnnnnnnnnnnnnnnnnnnnnnnnnnnnnnnnnnnnnnnnnnnnnnnnnnnnnnnnnnnnnnnnnnnnnnnnnnnnnnnnnnnnnnnnnnnnnnnnnnnnnnnnnnnnnnnnnnnnnnnnnnnnnnnnnnnnnnnnnnnnnnnnnnnnnnnnnnnnnnnnnnnnnnnnnnnnnnnnnnnnnnnnnnnnnnnnnnnnnnnnnnnnnnnnnnnnnnnnnnnnnnnnnnnnnnnnnnnnnnnnnnnnnnnnnnnnnnnnnnnnnnnnnnnnnnnnnnnnnnnnnnnnnnnnnnnnnnnnnnnnnnnnnnnnnnnnnnnnnnnnnnnnnnnnnnnnnnnnnnnnnnnnnnnnnnnnnnnnnnnnnnnnnnnnnnnnnnnnnnnnnnnnnnnnnnnnnnnnnnnnnnnnnnnnnnnnnnnnnnnnnnnnnnnnnnnnnnnnnnnnnnnnnnnnnnnnnnnnnnnnnnnnnnnnnnnnnnnnnnnnnnnnnnnnnnnnnnnnnnnnnnnnnnnnnnnnnnnnnnnnnnnnnnnnnnnnnnnnnnnnnnnnnnnnnnnnnnnnnnnnnnnnnnnnnnnnnnnnnnnnnnnnnnnnnnnnnnnnnnnnnnnnnnnnnnnnnnnnnnnnnnnnnnnnnnnnnnnnnnnnnnnnnnnnnnnnnnnnnnnnnnnnnnnnnnnnnnnnnnnnnnnnnnnnnnnnnnnnnnnnnnnnnnnnnnnnnnnnnnnnnnnnnnnnnnnnnnnnnnnnnnnnnnnnnnnnnnnnnnnnnnnnnnnnnnnnnnnnnnnnnnnnnnnnnnnnnnnnnnnnnnnnnnnnnnnnnnnnnnnnnnnnnnnnnnnnnnnnnnnnnnnnnnnnnnnnnnnnnnnnnnnnnnnnnnnnnnnnnnnnnnnnnnnnnnnnnnnnnnnnnnnnnnnnnnnnnnnnnnnnnnnnnnnnnnnnnnnnnnnnnnnnnnnnnnnnnnnnnnnnnnnnnnnnnnnnnnnnnnnnnnnnnnnnnnnnnnnnnnnnnnnnnnnnnnnnnnnnnnnnnnnnnnnnnnnnnnnnnnnnnnnnnnnnnnnnnnnnnnnnnnnnnnnnnnnnnnnnnnnnnnnnnnnnnnnnnnnnnnnnnnnnnnnnnnnnnnnnnnnnnnnnnnnnnnnnnnnnnnnnnnnnnnnnnnnnnnnnnnnnnnnnnnnnnnnnnnnnnnnnnnnnnnnnnnnnnnnnnnnnnnnnnnnnnnnnnnnnnnnnnnnnnnnnnnnnnnnnnnnnnnnnnnnnnnnnnnnnnnnnnnnnnnnnnnnnnnnnnnnnnnnnnnnnnnnnnnnnnnnnnnnnnnnnnnnnnnnnnnnnnnnnnnnnnnnnnnnnnnnnnnnnnnnnnnnnnnnnnnnnnnnnnnnnnnnnnnnnnnnnnnnnnnnnnnnnnnnnnnnnnnnnnnnnnnnnnnnnnnnnnnnnnnnnnnnnnnnnnnnnnnnnnnnnnnnnnnnnnnnnnnnnnnnnnnnnnnnnnnnnnnnnnnnnnnnnnnnnnnnnnnnnnnnnnnnnnnnnnnnnnnnnnnnnnnnnnnnnnnnnnnnnnnnnnnnnnnnnnnnnnnnnnnnnnnnnnnnnnnnnnnnnnnnnnnnnnnnnnnnnnnnnnnnnnnnnnnnnnnnnnnnnnnnnnnnnnnnnnnnnnnnnnnnnnnnnnnnnnnnnnnnnnnnnnnnnnnnnnnnnnnnnnnnnnnnnnnnnnnnnnnnnnnnnnnnnnnnnnnnnnnnnnnnnnnnnnnnnnnnnnnnnnnnnnnnnnnnnnnnnnnnnnnnnnnnnnnnnnnnnnnnnnnnnnnnnnnnnnnnnnnnnnnnnnnnnnnnnnnnnnnnnnnnnnnnnnnnnnnnnnnnnnnnnnnnnnnnnnnnnnnnnnnnnnnnnnnnnnnnnnnnnnnnnnnnnnnnnnnnnnnnnnnnnnnnnnnnnnnnnnnnnnnnnnnnnnnnnnnnnnnnnnnnnnnnnnnnnnnnnnnnnnnnnnnnnnnnnnnnnnnnnnnnnnnnnnnnnnnnnnnnnnnnnnnnnnnnnnnnnnnnnnnnnnnnnnnnnnnnnnnnnnnnnnnnnnnnnnnnnnnnnnnnnnnnnnnnnnnnnnnnnnnnnnnnnnnnnnnnnnnnnnnnnnnnnnnnnnnnnnnnnnnnnnnnnnnnnnnnnnnnnnnnnnnnnnnnnnnnnnnnnnnnnnnnnnnnnnnnnnnnnnnnnnnnnnnnnnnnnnnnnnnnnnnnnnnnnnnnnnnnnnnnnnnnnnnnnnnnnnnnnnnnnnnnnnnnnnnnnnnnnnnnnnnnnnnnnnnnnnnnnnnnnnnnnnnnnnnnnnnnnnnnnnnnnnnnnnnnnnnnnnnnnnnnnnnnnnnnnnnnnnnnnnnnnnnnnnnnnnnnnnnnnnnnnnnnnnnnnnnnnnnnnnnnnnnnnnnnnnnnnnnnnnnnnnnnnnnnnnnnnnnnnnnnnnnnnnnnnnnnnnnnnnnnnnnnnnnnnnnnnnnnnnnnnnnnnnnnnnnnnnnnnnnnnnnnnnnnnnnnnnnnnnnnnnnnnnnnnnnnnnnnnnnnnnnnnnnnnnnnnnnnnnnnnnnnnnnnnnnnnnnnnnnnnnnnnnnnnnnnnnnnnnnnnnnnnnnnnnnnnnnnnnnnnnnnnnnnnnnnnnnnnnnnnnnnnnnnnnnnnnnnnnnnnnnnnnnnnnnnnnnnnnnnnnnnnnnnnnnnnnnnnnnnnnnnnnnnnnnnnnnnnnnnnnnnnnnnnnnnnnnnnnnnnnnnnnnnnnnnnnnnnnnnnnnnnnnnnnnnnnnnnnnnnnnnnnnnnnnnnnnnnnnnnnnnnnnnnnnnnnnnnnnnnnnnnnnnnnnnnnnnnnnnnnnnnnnnnnnnnnnnnnnnnnnnnnnnnnnnnnnnnnnnnnnnnnnnnnnnnnnnnnnnnnnnnnnnnnnnnnnnnnnnnnnnnnnnnnnnnnnnnnnnnnnnnnnnnnnnnnnnnnnnnnnnnnnnnnnnnnnnnnnnnnnnnnnnnnnnnnnnnnnnnnnnnnnnnnnnnnnnnnnnnnnnnnnnnnnnnnnnnnnnnnnnnnnnnnnnnnnnnnnnnnnnnnnnnnnnnnnnnnnnnnnnnnnnnnnnnnnnnnnnnnnnnnnnnnnnnnnnnnnnnnnnnnnnnnnnnnnnnnnnnnnnnnnnnnnnnnnnnnnnnnnnnnnnnnnnnnnnnnnnnnnnnnnnnnnnnnnnnnnnnnnnnnnnnnnnnnnnnnnnnnnnnnnnnnnnnnnnnnnnnnnnnnnnnnnnnnnnnnnnnnnnnnnnnnnnnnnnnnnnnnnnnnnnnnnnnnnnnnnnnnnnnnnnnnnnnnnnnnnnnnnnnnnnnnnnnnnnnnnnnnnnnnnnnnnnnnnnnnnnnnnnnnnnnnnnnnnnnnnnnnnnnnnnnnnnnnnnnnnnnnnnnnnnnnnnnnnnnnnnnnnnnnnnnnnnnnnnnnnnnnnnnnnnnnnnnnnnnnnnnnnnnnnnnnnnnnnnnnnnnnnnnnnnnnnnnnnnnnnnnnnnnnnnnnnnnnnnnnnnnnnnnnnnnnnnnnnnnnnnnnnnnnnnnnnnnnnnnnnnnnnnnnnnnnnnnnnnnnnnnnnnnnnnnnnnnnnnnnnnnnnnnnnnnnnnnnnnnnnnnnnnnnnnnnnnnnnnnnnnnnnnnnnnnnnnnnnnnnnnnnnnnnnnnnnnnnnnnnnnnnnnnnnnnnnnnnnnnnnnnnnnnnnnnnnnnnnnnnnnnnnnnnnnnnnnnnnnnnnnnnnnnnnnnnnnnnnnnnnnnnnnnnnnnnnnnnnnnnnnnnnnnnnnnnnnnnnnnnnnnnnnnnnnnnnnnnnnnnnnnnnnnnnnnnnnnnnnnnnnnnnnnnnnnnnnnnnnnnnnnnnnnnnnnnnnnnnnnnnnnnnnnnnnnnnnnnnnnnnnnnnnnnnnnnnnnnnnnnnnnnnnnnnnnnnnnnnnnnnnnnnnnnnnnnnnnnnnnnnnnnnnnnnnnnnnnnnnnnnnnnnnnnnnnnnnnnnnnnnnnnnnnnnnnnnnnnnnnnnnnnnnnnnnnnnnnnnnnnnnnnnnnnnnnnnnnnnnnnnnnnnnnnnnnnnnnnnnnnnnnnnnnnnnnnnnnnnnnnnnnnnnnnnnnnnnnnnnnnnnnnnnnnnnnnnnnnnnnnnnnnnnnnnnnnnnnnnnnnnnnnnnnnnnnnnnnnnnnnnnnnnnnnnnnnnnnnnnnnnnnnnnnnnnnnnnnnnnnnnnnnnnnnnnnnnnnnnnnnnnnnnnnnnnnnnnnnnnnnnnnnnnnnnnnnnnnnnnnnnnnnnnnnnnnnnnnnnnnnnnnnnnnnnnnnnnnnnnnnnnnnnnnnnnnnnnnnnnnnnnnnnnnnnnnnnnnnnnnnnnnnnnnnnnnnnnnnnnnnnnnnnnnnnnnnnnnnnnnnnnnnnnnnnnnnnnnnnnnnnnnnnnnnnnnnnnnnnnnnnnnnnnnnnnnnnnnnnnnnnnnnnnnnnnnnnnnnnnnnnnnnnnnnnnnnnnnnnnnnnnnnnnnnnnnnnnnnnnnnnnnnnnnnnnnnnnnnnnnnnnnnnnnnnnnnnnnnnnnnnnnnnnnnnnnnnnnnnnnnnnnnnnnnnnnnnnnnnnnnnnnnnnnnnnnnnnnnnnnnnnnnnnnnnnnnnnnnnnnnnnnnnnnnnnnnnnnnnnnnnnnnnnnnnnnnnnnnnnnnnnnnnnnnnnnnnnnnnnnnnnnnnnnnnnnnnnnnnnnnnnnnnnnnnnnnnnnnnnnnnnnnnnnnnnnnnnnnnnnnnnnnnnnnnnnnnnnnnnnnnnnnnnnnnnnnnnnnnnnnnnnnnnnnnnnnnnnnnnnnnnnnnnnnnnnnnnnnnnnnnnnnnnnnnnnnnnnnnnnnnnnnnnnnnnnnnnnnnnnnnnnnnnnnnnnnnnnnnnnnnnnnnnnnnnnnnnnnnnnnnnnnnnnnnnnnnnnnnnnnnnnnnnnnnnnnnnnnnnnnnnnnnnnnnnnnnnnnnnnnnnnnnnnnnnnnnnnnnnnnnnnnnnnnnnnnnnnnnnnnnnnnnnnnnnnnnnnnnnnnnnnnnnnnnnnnnnnnnnnnnnnnnnnnnnnnnnnnnnnnnnnnnnnnnnnnnnnnnnnnnnnnnnnnnnnnnnnnnnnnnnnnnnnnnnnnnnnnnnnnnnnnnnnnnnnnnnnnnnnnnnnnnnnnnnnnnnnnnnnnnnnnnnnnnnnnnnnnnnnnnnnnnnnnnnnnnnnnnnnnnnnnnnnnnnnnnnnnnnnnnnnnnnnnnnnnnnnnnnnnnnnnnnnnnnnnnnnnnnnnnnnnnnnnnnnnnnnnnnnnnnnnnnnnnnnnnnnnnnnnnnnnnnnnnnnnnnnnnnnnnnnnnnnnnnnnnnnnnnnnnnnnnnnnnnnnnnnnnnnnnnnnnnnnnnnnnnnnnnnnnnnnnnnnnnnnnnnnnnnnnnnnnnnnnnnnnnnnnnnnnnnnnnnnnnnnnnnnnnnnnnnnnnnnnnnnnnnnnnnnnnnnnnnnnnnnnnnnnnnnnnnnnnnnnnnnnnnnnnnnnnnnnnnnnnnnnnnnnnnnnnnnnnnnnnnnnnnnnnnnnnnnnnnnnnnnnnnnnnnnnnnnnnnnnnnnnnnnnnnnnnnnnnnnnnnnnnnnnnnnnnnnnnnnnnnnnnnnnnnnnnnnnnnnnnnnnnnnnnnnnnnnnnnnnnnnnnnnnnnnnnnnnnnnnnnnnnnnnnnnnnnnnnnnnnnnnnnnnnnnnnnnnnnnnnnnnnnnnnnnnnnnnnnnnnnnnnnnnnnnnnnnnnnnnnnnnnnnnnnnnnnnnnnnnnnnnnnnnnnnnnnnnnnnnnnnnnnnnnnnnnnnnnnnnnnnnnnnnnnnnnnnnnnnnnnnnnnnnnnnnnnnnnnnnnnnnnnnnnnnnnnnnnnnnnnnnnnnnnnnnnnnnnnnnnnnnnnnnnnnnnnnnnnnnnnnnnnnnnnnnnnnnnnnnnnnnnnnnnnnnnnnnnnnnnnnnnnnnnnnnnnnnnnnnnnnnnnnnnnnnnnnnnnnnnnnnnnnnnnnnnnnnnnnnnnnnnnnnnnnnnnnnnnnnnnnnnnnnnnnnnnnnnnnnnnnnnnnnnnnnnnnnnnnnnnnnnnnnnnnnnnnnnnnnnnnnnnnnnnnnnnnnnnnnnnnnnnnnnnnnnnnnnnnnnnnnnnnnnnnnnnnnnnnnnnnnnnnnnnnnnnnnnnnnnnnnnnnnnnnnnnnnnnnnnnnnnnnnnnnnnnnnnnnnnnnnnnnnnnnnnnnnnnnnnnnnnnnnnnnnnnnnnnnnnnnnnnnnnnnnnnnnnnnnnnnnnnnnnnnnnnnnnnnnnnnnnnnnnnnnnnnnnnnnnnnnnnnnnnnnnnnnnnnnnnnnnnnnnnnnnnnnnnnnnnnnnnnnnnnnnnnnnnnnnnnnnnnnnnnnnnnnnnnnnnnnnnnnnnnnnnnnnnnnnnnnnnnnnnnnnnnnnnnnnnnnnnnnnnnnnnnnnnnnnnnnnnnnnnnnnnnnnnnnnnnnnnnnnnnnnnnnnnnnnnnnnnnnnnnnnnnnnnnnnnnnnnnnnnnnnnnnnnnnnnnnnnnnnnnnnnnnnnnnnnnnnnnnnnnnnnnnnnnnnnnnnnnnnnnnnnnnnnnnnnnnnnnnnnnnnnnnnnnnnnnnnnnnnnnnnnnnnnnnnnnnnnnnnnnnnnnnnnnnnnnnnnnnnnnnnnnnnnnnnnnnnnnnnnnnnnnnnnnnnnnnnnnnnnnnnnnnnnnnnnnnnnnnnnnnnnnnnnnnnnnnnnnnnnnnnnnnnnnnnnnnnnnnnnnnnnnnnnnnnnnnnnnnnnnnnnnnnnnnnnnnnnnnnnnnnnnnnnnnnnnnnnnnnnnnnnnnnnnnnnnnnnnnnnnnnnnnnnnnnnnnnnnnnnnnnnnnnnnnnnnnnnnnnnnnnnnnnnnnnnnnnnnnnnnnnnnnnnnnnnnnnnnnnnnnnnnnnnnnnnnnnnnnnnnnnnnnnnnnnnnnnnnnnnnnnnnnnnnnnnnnnnnnnnnnnnnnnnnnnnnnnnnnnnnnnnnnnnnnnnnnnnnnnnnnnnnnnnnnnnnnnnnnnnnnnnnnnnnnnnnnnnnnnnnnnnnnnnnnnnnnnnnnnnnnnnnnnnnnnnnnnnnnnnnnnnnnnnnnnnnnnnnnnnnnnnnnnnnnnnnnnnnnnnnnnnnnnnnnnnnnnnnnnnnnnnnnnnnnnnnnnnnnnnnnnnnnnnnnnnnnnnnnnnnnnnnnnnnnnnnnnnnnnnnnnnnnnnnnnnnnnnnnnnnnnnnnnnnnnnnnnnnnnnnnnnnnnnnnnnnnnnnnnnnnnnnnnnnnnnnnnnnnnnnnnnnnnnnnnnnnnnnnnnnnnnnnnnnnnnnnnnnnnnnnnnnnnnnnnnnnnnnnnnnnnnnnnnnnnnnnnnnnnnnnnnnnnnnnnnnnnnnnnnnnnnnnnnnnnnnnnnnnnnnnnnnnnnnnnnnnnnnnnnnnnnnnnnnnnnnnnnnnnnnnnnnnnnnnnnnnnnnnnnnnnnnnnnnnnnnnnnnnnnnnnnnnnnnnnnnnnnnnnnnnnnnnnnnnnnnnnnnnnnnnnnnnnnnnnnnnnnnnnnnnnnnnnnnnnnnnnnnnnnnnnnnnnnnnnnnnnnnnnnnnnnnnnnnnnnnnnnnnnnnnnnnnnnnnnnnnnnnnnnnnnnnnnnnnnnnnnnnnnnnnnnnnnnnnnnnnnnnnnnnnnnnnnnnnnnnnnnnnnnnnnnnnnnnnnnnnnnnnnnnnnnnnnnnnnnnnnnnnnnnnnnnnnnnnnnnnnnnnnnnnnnnnnnnnnnnnnnnnnnnnnnnnnnnnnnnnnnnnnnnnnnnnnnnnnnnnnnnnnnnnnnnnnnnnnnnnnnnnnnnnnnnnnnnnnnnnnnnnnnnnnnnnnnnnnnnnnnnnnnnnnnnnnnnnnnnnnnnnnnnnnnnnnnnnnnnnnnnnnnnnnnnnnnnnnnnnnnnnnnnnnnnnnnnnnnnnnnnnnnnnnnnnnnnnnnnnnnnnnnnnnnnnnnnnnnnnnnnnnnnnnnnnnnnnnnnnnnnnnnnnnnnnnnnnnnnnnnnnnnnnnnnnnnnnnnnnnnnnnnnnnnnnnnnnnnnnnnnnnnnnnnnnnnnnnnnnnnnnnnnnnnnnnnnnnnnnnnnnnnnnnnnnnnnnnnnnnnnnnnnnnnnnnnnnnnnnnnnnnnnnnnnnnnnnnnnnnnnnnnnnnnnnnnnnnnnnnnnnnnnnnnnnnnnnnnnnnnnnnnnnnnnnnnnnnnnnnnnnnnnnnnnnnnnnnnnnnnnnnnnnnnnnnnnnnnnnnnnnnnnnnnnnnnnnnnnnnnnnnnnnnnnnnnnnnnnnnnnnnnnnnnnnnnnnnnnnnnnnnnnnnnnnnnnnnnnnnnnnnnnnnnnnnnnnnnnnnnnnnnnnnnnnnnnnnnnnnnnnnnnnnnnnnnnnnnnnnnnnnnnnnnnnnnnnnnnnnnnnnnnnnnnnnnnnnnnnnnnnnnnnnnnnnnnnnnnnnnnnnnnnnnnnnnnnnnnnnnnnnnnnnnnnnnnnnnnnnnnnnnnnnnnnnnnnnnnnnnnnnnnnnnnnnnnnnnnnnnnnnnnnnnnnnnnnnnnnnnnnnnnnnnnnnnnnnnnnnnnnnnnnnnnnnnnnnnnnnnnnnnnnnnnnnnnnnnnnnnnnnnnnnnnnnnnnnnnnnnnnnnnnnnnnnnnnnnnnnnnnnnnnnnnnnnnnnnnnnnnnnnnnnnnnnnnnnnnnnnnnnnnnnnnnnnnnnnnnnnnnnnnnnnnnnnnnnnnnnnnnnnnnnnnnnnnnnnnnnnnnnnnnnnnnnnnnnnnnnnnnnnnnnnnnnnnnnnnnnnnnnnnnnnnnnnnnnnnnnnnnnnnnnnnnnnnnnnnnnnnnnnnnnnnnnnnnnnnnnnnnnnnnnnnnnnnnnnnnnnnnnnnnnnnnnnnnnnnnnnnnnnnnnnnnnnnnnnnnnnnnnnnnnnnnnnnnnnnnnnnnnnnnnnnnnnnnnnnnnnnnnnnnnnnnnnnnnnnnnnnnnnnnnnnnnnnnnnnnnnnnnnnnnnnnnnnnnnnnnnnnnnnnnnnnnnnnnnnnnnnnnnnnnnnnnnnnnnnnnnnnnnnnnnnnnnnnnnnnnnnnnnnnnnnnnnnnnnnnnnnnnnnnnnnnnnnnnnnnnnnnnnnnnnnnnnnnnnnnnnnnnnnnnnnnnnnnnnnnnnnnnnnnnnnnnnnnnnnnnnnnnnnnnnnnnnnnnnnnnnnnnnnnnnnnnnnnnnnnnnnnnnnnnnnnnnnnnnnnnnnnnnnnnnnnnnnnnnnnnnnnnnnnnnnnnnnnnnnnnnnnnnnnnnnnnnnnnnnnnnnnnnnnnnnnnnnnnnnnnnnnnnnnnnnnnnnnnnnnnnnnnnnnnnnnnnnnnnnnnnnnnnnnnnnnnnnnnnnnnnnnnnnnnnnnnnnnnnnnnnnnnnnnnnnnnnnnnnnnnnnnnnnnnnnnnnnnnnnnnnnnnnnnnnnnnnnnnnnnnnnnnnnnnnnnnnnnnnnnnnnnnnnnnnnnnnnnnnnnnnnnnnnnnnnnnnnnnnnnnnnnnnnnnnnnnnnnnnnnnnnnnnnnnnnnnnnnnnnnnnnnnnnnnnnnnnnnnnnnnnnnnnnnnnnnnnnnnnnnnnnnnnnnnnnnnnnnnnnnnnnnnnnnnnnnnnnnnnnnnnnnnnnnnnnnnnnnnnnnnnnnnnnnnnnnnnnnnnnnnnnnnnnnnnnnnnnnnnnnnnnnnnnnnnnnnnnnnnnnnnnnnnnnnnnnnnnnnnnnnnnnnnnnnnnnnnnnnnnnnnnnnnnnnnnnnnnnnnnnnnnnnnnnnnnnnnnnnnnnnnnnnnnnnnnnnnnnnnnnnnnnnnnnnnnnnnnnnnnnnnnnnnnnnnnnnnnnnnnnnnnnnnnnnnnnnnnnnnnnnnnnnnnnnnnnnnnnnnnnnnnnnnnnnnnnnnnnnnnnnnnnnnnnnnnnnnnnnnnnnnnnnnnnnnnnnnnnnnnnnnnnnnnnnnnnnnnnnnnnnnnnnnnnnnnnnnnnnnnnnnnnnnnnnnnnnnnnnnnnnnnnnnnnnnnnnnnnnnnnnnnnnnnnnnnnnnnnnnnnnnnnnnnnnnnnnnnnnnnnnnnnnnnnnnnnnnnnnnnnnnnnnnnnnnnnnnnnnnnnnnnnnnnnnnnnnnnnnnnnnnnnnnnnnnnnnnnnnnnnnnnnnnnnnnnnnnnnnnnnnnnnnnnnnnnnnnnnnnnnnnnnnnnnnnnnnnnnnnnnnnnnnnnnnnnnnnnnnnnnnnnnnnnnnnnnnnnnnnnnnnnnnnnnnnnnnnnnnnnnnnnnnnnnnnnnnnnnnnnnnnnnnnnnnnnnnnnnnnnnnnnnnnnnnnnnnnnnnnnnnnnnnnnnnnnnnnnnnnnnnnnnnnnnnnnnnnnnnnnnnnnnnnnnnnnnnnnnnnnnnnnnnnnnnnnnnnnnnnnnnnnnnnnnnnnnnnnnnnnnnnnnnnnnnnnnnnnnnnnnnnnnnnnnnnnnnnnnnnnnnnnnnnnnnnnnnnnnnnnnnnnnnnnnnnnnnnnnnnnnnnnnnnnnnnnnnnnnnnnnnnnnnnnnnnnnnnnnnnnnnnnnnnnnnnnnnnnnnnnnnnnnnnnnnnnnnnnnnnnnnnnnnnnnnnnnnnnnnnnnnnnnnnnnnnnnnnnnnnnnnnnnnnnnnnnnnnnnnnnnnnnnnnnnnnnnnnnnnnnnnnnnnnnnnnnnnnnnnnnnnnnnnnnnnnnnnnnnnnnnnnnnnnnnnnnnnnnnnnnnnnnnnnnnnnnnnnnnnnnnnnnnnnnnnnnnnnnnnnnnnnnnnnnnnnnnnnnnnnnnnnnnnnnnnnnnnnnnnnnnnnnnnnnnnnnnnnnnnnnnnnnnnnnnnnnnnnnnnnnnnnnnnnnnnnnnnnnnnnnnnnnnnnnnnnnnnnnnnnnnnnnnnnnnnnnnnnnnnnnnnnnnnnnnnnnnnnnnnnnnnnnnnnnnnnnnnnnnnnnnnnnnnnnnnnnnnnnnnnnnnnnnnnnnnnnnnnnnnnnnnnnnnnnnnnnnnnnnnnnnnnnnnnnnnnnnnnnnnnnnnnnnnnnnnnnnnnnnnnnnnnnnnnnnnnnnnnnnnnnnnnnnnnnnnnnnnnnnnnnnnnnnnnnnnnnnnnnnnnnnnnnnnnnnnnnnnnnnnnnnnnnnnnnnnnnnnnnnnnnnnnnnnnnnnnnnnnnnnnnnnnnnnnnnnnnnnnnnnnnnnnnnnnnnnnnnnnnnnnnnnnnnnnnnnnnnnnnnnnnnnnnnnnnnnnnnnnnnnnnnnnnnnnnnnnnnnnnnnnnnnnnnnnnnnnnnnnnnnnnnnnnnnnnnnnnnnnnnnnnnnnnnnnnnnnnnnnnnnnnnnnnnnnnnnnnnnnnnnnnnnnnnnnnnnnnnnnnnnnnnnnnnnnnnnnnnnnnnnnnnnnnnnnnnnnnnnnnnnnnnnnnnnnnnnnnnnnnnnnnnnnnnnnnnnnnnnnnnnnnnnnnnnnnnnnnnnnnnnnnnnnnnnnnnnnnnnnnnnnnnnnnnnnnnnnnnnnnnnnnnnnnnnnnnnnnnnnnnnnnnnnnnnnnnnnnnnnnnnnnnnnnnnnnnnnnnnnnnnnnnnnnnnnnnnnnnnnnnnnnnnnnnnnnnnnnnnnnnnnnnnnnnnnnnnnnnnnnnnnnnnnnnnnnnnnnnnnnnnnnnnnnnnnnnnnnnnnnnnnnnnnnnnnnnnnnnnnnnnnnnnnnnnnnnnnnnnnnnnnnnnnnnnnnnnnnnnnnnnnnnnnnnnnnnnnnnnnnnnnnnnnnnnnnnnnnnnnnnnnnnnnnnnnnnnnnnnnnnnnnnnnnnnnnnnnnnnnnnnnnnnnnnnnnnnnnnnnnnnnnnnnnnnnnnnnnnnnnnnnnnnnnnnnnnnnnnnnnnnnnnnnnnnnnnnnnnnnnnnnnnnnnnnnnnnnnnnnnnnnnnnnnnnnnnnnnnnnnnnnnnnnnnnnnnnnnnnnnnnnnnnnnnnnnnnnnnnnnnnnnnnnnnnnnnnnnnnnnnnnnnnnnnnnnnnnnnnnnnnnnnnnnnnnnnnnnnnnnnnnnnnnnnnnnnnnnnnnnnnnnnnnnnnnnnnnnnnnnnnnnnnnnnnnnnnnnnnnnnnnnnnnnnnnnnnnnnnnnnnnnnnnnnnnnnnnnnnnnnnnnnnnnnnnnnnnnnnnnnnnnnnnnnnnnnnnnnnnnnnnnnnnnnnnnnnnnnnnnnnnnnnnnnnnnnnnnnnnnnnnnnnnnnnnnnnnnnnnnnnnnnnnnnnnnnnnnnnnnnnnnnnnnnnnnnnnnnnnnnnnnnnnnnnnnnnnnnnnnnnnnnnnnnnnnnnnnnnnnnnnnnnnnnnnnnnnnnnnnnnnnnnnnnnnnnnnnnnnnnnnnnnnnnnnnnnnnnnnnnnnnnnnnnnnnnnnnnnnnnnnnnnnnnnnnnnnnnnnnnnnnnnnnnnnnnnnnnnnnnnnnnnnnnnnnnnnnnnnnnnnnnnnnnnnnnnnnnnnnnnnnnnnnnnnnnnnnnnnnnnnnnnnnnnnnnnnnnnnnnnnnnnnnnnnnnnnnnnnnnnnnnnnnnnnnnnnnnnnnnnnnnnnnnnnnnnnnnnnnnnnnnnnnnnnnnnnnnnnnnnnnnnnnnnnnnnnnnnnnnnnnnnnnnnnnnnnnnnnnnnnnnnnnnnnnnnnnnnnnnnnnnnnnnnnnnnnnnnnnnnnnnnnnnnnnnnnnnnnnnnnnnnnnnnnnnnnnnnnnnnnnnnnnnnnnnnnnnnnnnnnnnnnnnnnnnnnnnnnnnnnnnnnnnnnnnnnnnnnnnnnnnnnnnnnnnnnnnnnnnnnnnnnnnnnnnnnnnnnnnnnnnnnnnnnnnnnnnnnnnnnnnnnnnnnnnnnnnnnnnnnnnnnnnnnnnnnnnnnnnnnnnnnnnnnnnnnnnnnnnnnnnnnnnnnnnnnnnnnnnnnnnnnnnnnnnnnnnnnnnnnnnnnnnnnnnnnnnnnnnnnnnnnnnnnnnnnnnnnnnnnnnnnnnnnnnnnnnnnnnnnnnnnnnnnnnnnnnnnnnnnnnnnnnnnnnnnnnnnnnnnnnnnnnnnnnnnnnnnnnnnnnnnnnnnnnnnnnnnnnnnnnnnnnnnnnnnnnnnnnnnnnnnnnnnnnnnnnnnnnnnnnnnnnnnnnnnnnnnnnnnnnnnnnnnnnnnnnnnnnnnnnnnnnnnnnnnnnnnnnnnnnnnnnnnnnnnnnnnnnnnnnnnnnnnnnnnnnnnnnnnnnnnnnnnnnnnnnnnnnnnnnnnnnnnnnnnnnnnnnnnnnnnnnnnnnnnnnnnnnnnnnnnnnnnnnnnnnnnnnnnnnnnnnnnnnnnnnnnnnnnnnnnnnnnnnnnnnnnnnnnnnnnnnnnnnnnnnnnnnnnnnnnnnnnnnnnnnnnnnnnnnnnnnnnnnnnnnnnnnnnnnnnnnnnnnnnnnnnnnnnnnnnnnnnnnnnnnnnnnnnnnnnnnnnnnnnnnnnnnnnnnnnnnnnnnnnnnnnnnnnnnnnnnnnnnnnnnnnnnnnnnnnnnnnnnnnnnnnnnnnnnnnnnnnnnnnnnnnnnnnnnnnnnnnnnnnnnnnnnnnnnnnnnnnnnnnnnnnnnnnnnnnnnnnnnnnnnnnnnnnnnnnnnnnnnnnnnnnnnnnnnnnnnnnnnnnnnnnnnnnnnnnnnnnnnnnnnnnnnnnnnnnnnnnnnnnnnnnnnnnnnnnnnnnnnnnnnnnnnnnnnnnnnnnnnnnnnnnnnnnnnnnnnnnnnnnnnnnnnnnnnnnnnnnnnnnnnnnnnnnnnnnnnnnnnnnnnnnnnnnnnnnnnnnnnnnnnnnnnnnnnnnnnnnnnnnnnnnnnnnnnnnnnnnnnnnnnnnnnnnnnnnnnnnnnnnnnnnnnnnnnnnnnnnnnnnnnnnnnnnnnnnnnnnnnnnnnnnnnnnnnnnnnnnnnnnnnnnnnnnnnnnnnnnnnnnnnnnnnnnnnnnnnnnnnnnnnnnnnnnnnnnnnnnnnnnnnnnnnnnnnnnnnnnnnnnnnnnnnnnnnnnnnnnnnnnnnnnnnnnnnnnnnnnnnnnnnnnnnnnnnnnnnnnnnnnnnnnnnnnnnnnnnnnnnnnnnnnnnnnnnnnnnnnnnnnnnnnnnnnnnnnnnnnnnnnnnnnnnnnnnnnnnnnnnnnnnnnnnnnnnnnnnnnnnnnnnnnnnnnnnnnnnnnnnnnnnnnnnnnnnnnnnnnnnnnnnnnnnnnnnnnnnnnnnnnnnnnnnnnnnnnnnnnnnnnnnnnnnnnnnnnnnnnnnnnnnnnnnnnnnnnnnnnnnnnnnnnnnnnnnnnnnnnnnnnnnnnnnnnnnnnnnnnnnnnnnnnnnnnnnnnnnnnnnnnnnnnnnnnnnnnnnnnnnnnnnnnnnnnnnnnnnnnnnnnnnnnnnnnnnnnnnnnnnnnnnnnnnnnnnnnnnnnnnnnnnnnnnnnnnnnnnnnnnnnnnnnnnnnnnnnnnnnnnnnnnnnnnnnnnnnnnnnnnnnnnnnnnnnnnnnnnnnnnnnnnnnnnnnnnnnnnnnnnnnnnnnnnnnnnnnnnnnnnnnnnnnnnnnnnnnnnnnnnnnnnnnnnnnnnnnnnnnnnnnnnnnnnnnnnnnnnnnnnnnnnnnnnnnnnnnnnnnnnnnnnnnnnnnnnnnnnnnnnnnnnnnnnnnnnnnnnnnnnnnnnnnnnnnnnnnnnnnnnnnnnnnnnnnnnnnnnnnnnnnnnnnnnnnnnnnnnnnnnnnnnnnnnnnnnnnnnnnnnnnnnnnnnnnnnnnnnnnnnnnnnnnnnnnnnnnnnnnnnnnnnnnnnnnnnnnnnnnnnnnnnnnnnnnnnnnnnnnnnnnnnnnnnnnnnnnnnnnnnnnnnnnnnnnnnnnnnnnnnnnnnnnnnnnnnnnnnnnnnnnnnnnnnnnnnnnnnnnnnnnnnnnnnnnnnnnnnnnnnnnnnnnnnnnnnnnnnnnnnnnnnnnnnnnnnnnnnnnnnnnnnnnnnnnnnnnnnnnnnnnnnnnnnnnnnnnnnnnnnnnnnnnnnnnnnnnnnnnnnnnnnnnnnnnnnnnnnnnnnnnnnnnnnnnnnnnnnnnnnnnnnnnnnnnnnnnnnnnnnnnnnnnnnnnnnnnnnnnnnnnnnnnnnnnnnnnnnnnnnnnnnnnnnnnnnnnnnnnnnnnnnnnnnnnnnnnnnnnnnnnnnnnnnnnnnnnnnnnnnnnnnnnnnnnnnnnnnnnnnnnnnnnnnnnnnnnnnnnnnnnnnnnnnnnnnnnnnnnnnnnnnnnnnnnnnnnnnnnnnnnnnnnnnnnnnnnnnnnnnnnnnnnnnnnnnnnnnnnnnnnnnnnnnnnnnnnnnnnnnnnnnnnnnnnnnnnnnnnnnnnnnnnnnnnnnnnnnnnnnnnnnnnnnnnnnnnnnnnnnnnnnnnnnnnnnnnnnnnnnnnnnnnnnnnnnnnnnnnnnnnnnnnnnnnnnnnnnnnnnnnnnnnnnnnnnnnnnnnnnnnnnnnnnnnnnnnnnnnnnnnnnnnnnnnnnnnnnnnnnnnnnnnnnnnnnnnnnnnnnnnnnnnnnnnnnnnnnnnnnnnnnnnnnnnnnnnnnnnnnnnnnnnnnnnnnnnnnnnnnnnnnnnnnnnnnnnnnnnnnnnnnnnnnnnnnnnnnnnnnnnnnnnnnnnnnnnnnnnnnnnnnnnnnnnnnnnnnnnnnnnnnnnnnnnnnnnnnnnnnnnnnnnnnnnnnnnnnnnnnnnnnnnnnnnnnnnnnnnnnnnnnnnnnnnnnnnnnnnnnnnnnnnnnnnnnnnnnnnnnnnnnnnnnnnnnnnnnnnnnnnnnnnnnnnnnnnnnnnnnnnnnnnnnnnnnnnnnnnnnnnnnnnnnnnnnnnnnnnnnnnnnnnnnnnnnnnnnnnnnnnnnnnnnnnnnnnnnnnnnnnnnnnnnnnnnnnnnnnnnnnnnnnnnnnnnnnnnnnnnnnnnnnnnnnnnnnnnnnnnnnnnnnnnnnnnnnnnnnnnnnnnnnnnnnnnnnnnnnnnnnnnnnnnnnnnnnnnnnnnnnnnnnnnnnnnnnnnnnnnnnnnnnnnnnnnnnnnnnnnnnnnnnnnnnnnnnnnnnnnnnnnnnnnnnnnnnnnnnnnnnnnnnnnnnnnnnnnnnnnnnnnnnnnnnnnnnnnnnnnnnnnnnnnnnnnnnnnnnnnnnnnnnnnnnnnnnnnnnnnnnnnnnnnnnnnnnnnnnnnnnnnnnnnnnnnnnnnnnnnnnnnnnnnnnnnnnnnnnnnnnnnnnnnnnnnnnnnnnnnnnnnnnnnnnnnnnnnnnnnnnnnnnnnnnnnnnnnnnnnnnnnnnnnnnnnnnnnnnnnnnnnnnnnnnnnnnnnnnnnnnnnnnnnnnnnnnnnnnnnnnnnnnnnnnnnnnnnnnnnnnnnnnnnnnnnnnnnnnnnnnnnnnnnnnnnnnnnnnnnnnnnnnnnnnnnnnnnnnnnnnnnnnnnnnnnnnnnnnnnnnnnnnnnnnnnnnnnnnnnnnnnnnnnnnnnnnnnnnnnnnnnnnnnnnnnnnnnnnnnnnnnnnnnnnnnnnnnnnnnnnnnnnnnnnnnnnnnnnnnnnnnnnnnnnnnnnnnnnnnnnnnnnnnnnnnnnnnnnnnnnnnnnnnnnnnnnnnnnnnnnnnnnnnnnnnnnnnnnnnnnnnnnnnnnnnnnnnnnnnnnnnnnnnnnnnnnnnnnnnnnnnnnnnnnnnnnnnnnnnnnnnnnnnnnnnnnnnnnnnnnnnnnnnnnnnnnnnnnnnnnnnnnnnnnnnnnnnnnnnnnnnnnnnnnnnnnnnnnnnnnnnnnnnnnnnnnnnnnnnnnnnnnnnnnnnnnnnnnnnnnnnnnnnnnnnnnnnnnnnnnnnnnnnnnnnnnnnnnnnnnnnnnnnnnnnnnnnnnnnnnnnnnnnnnnnnnnnnnnnnnnnnnnnnnnnnnnnnnnnnnnnnnnnnnnnnnnnnnnnnnnnnnnnnnnnnnnnnnnnnnnnnnnnnnnnnnnnnnnnnnnnnnnnnnnnnnnnnnnnnnnnnnnnnnnnnnnnnnnnnnnnnnnnnnnnnnnnnnnnnnnnnnnnnnnnnnnnnnnnnnnnnnnnnnnnnnnnnnnnnnnnnnnnnnnnnnnnnnnnnnnnnnnnnnnnnnnnnnnnnnnnnnnnnnnnnnnnnnnnnnnnnnnnnnnnnnnnnnnnnnnnnnnnnnnnnnnnnnnnnnnnnnnnnnnnnnnnnnnnnnnnnnnnnnnnnnnnnnnnnnnnnnnnnnnnnnnnnnnnnnnnnnnnnnnnnnnnnnnnnnnnnnnnnnnnnnnnnnnnnnnnnnnnnnnnnnnnnnnnnnnnnnnnnnnnnnnnnnnnnnnnnnnnnnnnnnnnnnnnnnnnnnnnnnnnnnnnnnnnnnnnnnnnnnnnnnnnnnnnnnnnnnnnnnnnnnnnnnnnnnnnnnnnnnnnnnnnnnnnnnnnnnnnnnnnnnnnnnnnnnnnnnnnnnnnnnnnnnnnnnnnnnnnnnnnnnnnnnnnnnnnnnnnnnnnnnnnnnnnnnnnnnnnnnnnnnnnnnnnnnnnnnnnnnnnnnnnnnnnnnnnnnnnnnnnnnnnnnnnnnnnnnnnnnnnnnnnnnnnnnnnnnnnnnnnnnnnnnnnnnnnnnnnnnnnnnnnnnnnnnnnnnnnnnnnnnnnnnnnnnnnnnnnnnnnnnnnnnnnnnnnnnnnnnnnnnnnnnnnnnnnnnnnnnnnnnnnnnnnnnnnnnnnnnnnnnnnnnnnnnnnnnnnnnnnnnnnnnnnnnnnnnnnnnnnnnnnnnnnnnnnnnnnnnnnnnnnnnnnnnnnnnnnnnnnnnnnnnnnnnnnnnnnnnnnnnnnnnnnnnnnnnnnnnnnnnnnnnnnnnnnnnnnnnnnnnnnnnnnnnnnnnnnnnnnnnnnnnnnnnnnnnnnnnnnnnnnnnnnnnnnnnnnnnnnnnnnnnnnnnnnnnnnnnnnnnnnnnnnnnnnnnnnnnnnnnnnnnnnnnnnnnnnnnnnnnnnnnnnnnnnnnnnnnnnnnnnnnnnnnnnnnnnnnnnnnnnnnnnnnnnnnnnnnnnnnnnnnnnnnnnnnnnnnnnnnnnnnnnnnnnnnnnnnnnnnnnnnnnnnnnnnnnnnnnnnnnnnnnnnnnnnnnnnnnnnnnnnnnnnnnnnnnnnnnnnnnnnnnnnnnnnnnnnnnnnnnnnnnnnnnnnnnnnnnnnnnnnnnnnnnnnnnnnnnnnnnnnnnnnnnnnnnnnnnnnnnnnnnnnnnnnnnnnnnnnnnnnnnnnnnnnnnnnnnnnnnnnnnnnnnnnnnnnnnnnnnnnnnnnnnnnnnnnnnnnnnnnnnnnnnnnnnnnnnnnnnnnnnnnnnnnnnnnnnnnnnnnnnnnnnnnnnnnnnnnnnnnnnnnnnnnnnnnnnnnnnnnnnnnnnnnnnnnnnnnnnnnnnnnnnnnnnnnnnnnnnnnnnnnnnnnnnnnnnnnnnnnnnnnnnnnnnnnnnnnnnnnnnnnnnnnnnnnnnnnnnnnnnnnnnnnnnnnnnnnnnnnnnnnnnnnnnnnnnnnnnnnnnnnnnnnnnnnnnnnnnnnnnnnnnnnnnnnnnnnnnnnnnnnnnnnnnnnnnnnnnnnnnnnnnnnnnnnnnnnnnnnnnnnnnnnnnnnnnnnnnnnnnnnnnnnnnnnnnnnnnnnnnnnnnnnnnnnnnnnnnnnnnnnnnnnnnnnnnnnnnnnnnnnnnnnnnnnnnnnnnnnnnnnnnnnnnnnnnnnnnnnnnnnnnnnnnnnnnnnnnnnnnnnnnnnnnnnnnnnnnnnnnnnnnnnnnnnnnnnnnnnnnnnnnnnnnnnnnnnnnnnnnnnnnnnnnnnnnnnnnnnnnnnnnnnnnnnnnnnnnnnnnnnnnnnnnnnnnnnnnnnnnnnnnnnnnnnnnnnnnnnnnnnnnnnnnnnnnnnnnnnnnnnnnnnnnnnnnnnnnnnnnnnnnnnnnnnnnnnnnnnnnnnnnnnnnnnnnnnnnnnnnnnnnnnnnnnnnnnnnnnnnnnnnnnnnnnnnnnnnnnnnnnnnnnnnnnnnnnnnnnnnnnnnnnnnnnnnnnnnnnnnnnnnnnnnnnnnnnnnnnnnnnnnnnnnnnnnnnnnnnnnnnnnnnnnnnnnnnnnnnnnnnnnnnnnnnnnnnnnnnnnnnnnnnnnnnnnnnnnnnnnnnnnnnnnnnnnnnnnnnnnnnnnnnnnnnnnnnnnnnnnnnnnnnnnnnnnnnnnnnnnnnnnnnnnnnnnnnnnnnnnnnnnnnnnnnnnnnnnnnnnnnnnnnnnnnnnnnnnnnnnnnnnnnnnnnnnnnnnnnnnnnnnnnnnnnnnnnnnnnnnnnnnnnnnnnnnnnnnnnnnnnnnnnnnnnnnnnnnnnnnnnnnnnnnnnnnnnnnnnnnnnnnnnnnnnnnnnnnnnnnnnnnnnnnnnnnnnnnnnnnnnnnnnnnnnnnnnnnnnnnnnnnnnnnnnnnnnnnnnnnnnnnnnnnnnnnnnnnnnnnnnnnnnnnnnnnnnnnnnnnnnnnnnnnnnnnnnnnnnnnnnnnnnnnnnnnnnnnnnnnnnnnnnnnnnnnnnnnnnnnnnnnnnnnnnnnnnnnnnnnnnnnnnnnnnnnnnnnnnnnnnnnnnnnnnnnnnnnnnnnnnnnnnnnnnnnnnnnnnnnnnnnnnnnnnnnnnnnnnnnnnnnnnnnnnnnnnnnnnnnnnnnnnnnnnnnnnnnnnnnnnnnnnnnnnnnnnnnnnnnnnnnnnnnnnnnnnnnnnnnnnnnnnnnnnnnnnnnnnnnnnnnnnnnnnnnnnnnnnnnnnnnnnnnnnnnnnnnnnnnnnnnnnnnnnnnnnnnnnnnnnnnnnnnnnnnnnnnnnnnnnnnnnnnnnnnnnnnnnnnnnnnnnnnnnnnnnnnnnnnnnnnnnnnnnnnnnnnnnnnnnnnnnnnnnnnnnnnnnnnnnnnnnnnnnnnnnnnnnnnnnnnnnnnnnnnnnnnnnnnnnnnnnnnnnnnnnnnnnnnnnnnnnnnnnnnnnnnnnnnnnnnnnnnnnnnnnnnnnnnnnnnnnnnnnnnnnnnnnnnnnnnnnnnnnnnnnnnnnnnnnnnnnnnnnnnnnnnnnnnnnnnnnnnnnnnnnnnnnnnnnnnnnnnnnnnnnnnnnnnnnnnnnnnnnnnnnnnnnnnnnnnnnnnnnnnnnnnnnnnnnnnnnnnnnnnnnnnnnnnnnnnnnnnnnnnnnnnnnnnnnnnnnnnnnnnnnnnnnnnnnnnnnnnnnnnnnnnnnnnnnnnnnnnnnnnnnnnnnnnnnnnnnnnnnnnnnnnnnnnnnnnnnnnnnnnnnnnnnnnnnnnnnnnnnnnnnnnnnnnnnnnnnnnnnnnnnnnnnnnnnnnnnnnnnnnnnnnnnnnnnnnnnnnnnnnnnnnnnnnnnnnnnnnnnnnnnnnnnnnnnnnnnnnnnnnnnnnnnnnnnnnnnnnnnnnnnnnnnnnnnnnnnnnnnnnnnnnnnnnnnnnnnnnnnnnnnnnnnnnnnnnnnnnnnnnnnnnnnnnnnnnnnnnnnnnnnnnnnnnnnnnnnnnnnnnnnnnnnnnnnnnnnnnnnnnnnnnnnnnnnnnnnnnnnnnnnnnnnnnnnnnnnnnnnnnnnnnnnnnnnnnnnnnnnnnnnnnnnnnnnnnnnnnnnnnnnnnnnnnnnnnnnnnnnnnnnnnnnnnnnnnnnnnnnnnnnnnnnnnnnnnnnnnnnnnnnnnnnnnnnnnnnnnnnnnnnnnnnnnnnnnnnnnnnnnnnnnnnnnnnnnnnnnnnnnnnnnnnnnnnnnnnnnnnnnnnnnnnnnnnnnnnnnnnnnnnnnnnnnnnnnnnnnnnnnnnnnnnnnnnnnnnnnnnnnnnnnnnnnnnnnnnnnnnnnnnnnnnnnnnnnnnnnnnnnnnnnnnnnnnnnnnnnnnnnnnnnnnnnnnnnnnnnnnnnnnnnnnnnnnnnnnnnnnnnnnnnnnnnnnnnnnnnnnnnnnnnnnnnnnnnnnnnnnnnnnnnnnnnnnnnnnnnnnnnnnnnnnnnnnnnnnnnnnnnnnnnnnnnnnnnnnnnnnnnnnnnnnnnnnnnnnnnnnnnnnnnnnnnnnnnnnnnnnnnnnnnnnnnnnnnnnnnnnnnnnnnnnnnnnnnnnnnnnnnnnnnnnnnnnnnnnnnnnnnnnnnnnnnnnnnnnnnnnnnnnnnnnnnnnnnnnnnnnnnnnnnnnnnnnnnnnnnnnnnnnnnnnnnnnnnnnnnnnnnnnnnnnnnnnnnnnnnnnnnnnnnnnnnnnnnnnnnnnnnnnnnnnnnnnnnnnnnnnnnnnnnnnnnnnnnnnnnnnnnnnnnnnnnnnnnnnnnnnnnnnnnnnnnnnnnnnnnnnnnnnnnnnnnnnnnnnnnnnnnnnnnnnnnnnnnnnnnnnnnnnnnnnnnnnnnnnnnnnnnnnnnnnnnnnnnnnnnnnnnnnnnnnnnnnnnnnnnnnnnnnnnnnnnnnnnnnnnnnnnnnnnnnnnnnnnnnnnnnnnnnnnnnnnnnnnnnnnnnnnnnnnnnnnnnnnnnnnnnnnnnnnnnnnnnnnnnnnnnnnnnnnnnnnnnnnnnnnnnnnnnnnnnnnnnnnnnnnnnnnnnnnnnnnnnnnnnnnnnnnnnnnnnnnnnnnnnnnnnnnnnnnnnnnnnnnnnnnnnnnnnnnnnnnnnnnnnnnnnnnnnnnnnnnnnnnnnnnnnnnnnnnnnnnnnnnnnnnnnnnnnnnnnnnnnnnnnnnnnnnnnnnnnnnnnnnnnnnnnnnnnnnnnnnnnnnnnnnnnnnnnnnnnnnnnnnnnnnnnnnnnnnnnnnnnnnnnnnnnnnnnnnnnnnnnnnnnnnnnnnnnnnnnnnnnnnnnnnnnnnnnnnnnnnnnnnnnnnnnnnnnnnnnnnnnnnnnnnnnnnnnnnnnnnnnnnnnnnnnnnnnnnnnnnnnnnnnnnnnnnnnnnnnnnnnnnnnnnnnnnnnnnnnnnnnnnnnnnnnnnnnnnnnnnnnnnnnnnnnnnnnnnnnnnnnnnnnnnnnnnnnnnnnnnnnnnnnnnnnnnnnnnnnnnnnnnnnnnnnnnnnnnnnnnnnnnnnnnnnnnnnnnnnnnnnnnnnnnnnnnnnnnnnnnnnnnnnnnnnnnnnnnnnnnnnnnnnnnnnnnnnnnnnnnnnnnnnnnnnnnnnnnnnnnnnnnnnnnnnnnnnnnnnnnnnnnnnnnnnnnnnnnnnnnnnnnnnnnnnnnnnnnnnnnnnnnnnnnnnnnnnnnnnnnnnnnnnnnnnnnnnnnnnnnnnnnnnnnnnnnnnnnnnnnnnnnnnnnnnnnnnnnnnnnnnnnnnnnnnnnnnnnnnnnnnnnnnnnnnnnnnnnnnnnnnnnnnnnnnnnnnnnnnnnnnnnnnnnnnnnnnnnnnnnnnnnnnnnnnnnnnnnnnnnnnnnnnnnnnnnnnnnnnnnnnnnnnnnnnnnnnnnnnnnnnnnnnnnnnnnnnnnnnnnnnnnnnnnnnnnnnnnnnnnnnnnnnnnnnnnnnnnnnnnnnnnnnnnnnnnnnnnnnnnnnnnnnnnnnnnnnnnnnnnnnnnnnnnnnnnnnnnnnnnnnnnnnnnnnnnnnnnnnnnnnnnnnnnnnnnnnnnnnnnnnnnnnnnnnnnnnnnnnnnnnnnnnnnnnnnnnnnnnnnnnnnnnnnnnnnnnnnnnnnnnnnnnnnnnnnnnnnnnnnnnnnnnnnnnnnnnnnnnnnnnnnnnnnnnnnnnnnnnnnnnnnnnnnnnnnnnnnnnnnnnnnnnnnnnnnnnnnnnnnnnnnnnnnnnnnnnnnnnnnnnnnnnnnnnnnnnnnnnnnnnnnnnnnnnnnnnnnnnnnnnnnnnnnnnnnnnnnnnnnnnnnnnnnnnnnnnnnnnnnnnnnnnnnnnnnnnnnnnnnnnnnnnnnnnnnnnnnnnnnnnnnnnnnnnnnnnnnnnnnnnnnnnnnnnnnnnnnnnnnnnnnnnnnnnnnnnnnnnnnnnnnnnnnnnnnnnnnnnnnnnnnnnnnnnnnnnnnnnnnnnnnnnnnnnnnnnnnnnnnnnnnnnnnnnnnnnnnnnnnnnnnnnnnnnnnnnnnnnnnnnnnnnnnnnnnnnnnnnnnnnnnnnnnnnnnnnnnnnnnnnnnnnnnnnnnnnnnnnnnnnnnnnnnnnnnnnnnnnnnnnnnnnnnnnnnnnnnnnnnnnnnnnnnnnnnnnnnnnnnnnnnnnnnnnnnnnnnnnnnnnnnnnnnnnnnnnnnnnnnnnnnnnnnnnnnnnnnnnnnnnnnnnnnnnnnnnnnnnnnnnnnnnnnnnnnnnnnnnnnnnnnnnnnnnnnnnnnnnnnnnnnnnnnnnnnnnnnnnnnnnnnnnnnnnnnnnnnnnnnnnnnnnnnnnnnnnnnnnnnnnnnnnnnnnnnnnnnnnnnnnnnnnnnnnnnnnnnnnnnnnnnnnnnnnnnnnnnnnnnnnnnnnnnnnnnnnnnnnnnnnnnnnnnnnnnnnnnnnnnnnnnnnnnnnnnnnnnnnnnnnnnnnnnnnnnnnnnnnnnnnnnnnnnnnnnnnnnnnnnnnnnnnnnnnnnnnnnnnnnnnnnnnnnnnnnnnnnnnnnnnnnnnnnnnnnnnnnnnnnnnnnnnnnnnnnnnnnnnnnnnnnnnnnnnnnnnnnnnnnnnnnnnnnnnnnnnnnnnnnnnnnnnnnnnnnnnnnnnnnnnnnnnnnnnnnnnnnnnnnnnnnnnnnnnnnnnnnnnnnnnnnnnnnnnnnnnnnnnnnnnnnnnnnnnnnnnnnnnnnnnnnnnnnnnnnnnnnnnnnnnnnnnnnnnnnnnnnnnnnnnnnnnnnnnnnnnnnnnnnnnnnnnnnnnnnnnnnnnnnnnnnnnnnnnnnnnnnnnnnnnnnnnnnnnnnnnnnnnnnnnnnnnnnnnnnnnnnnnnnnnnnnnnnnnnnnnnnnnnnnnnnnnnnnnnnnnnnnnnnnnnnnnnnnnnnnnnnnnnnnnnnnnnnnnnnnnnnnnnnnnnnnnnnnnnnnnnnnnnnnnnnnnnnnnnnnnnnnnnnnnnnnnnnnnnnnnnnnnnnnnnnnnnnnnnnnnnnnnnnnnnnnnnnnnnnnnnnnnnnnnnnnnnnnnnnnnnnnnnnnnnnnnnnnnnnnnnnnnnnnnnnnnnnnnnnnnnnnnnnnnnnnnnnnnnnnnnnnnnnnnnnnnnnnnnnnnnnnnnnnnnnnnnnnnnnnnnnnnnnnnnnnnnnnnnnnnnnnnnnnnnnnnnnnnnnnnnnnnnnnnnnnnnnnnnnnnnnnnnnnnnnnnnnnnnnnnnnnnnnnnnnnnnnnnnnnnnnnnnnnnnnnnnnnnnnnnnnnnnnnnnnnnnnnnnnnnnnnnnnnnnnnnnnnnnnnnnnnnnnnnnnnnnnnnnnnnnnnnnnnnnnnnnnnnnnnnnnnnnnnnnnnnnnnnnnnnnnnnnnnnnnnnnnnnnnnnnnnnnnnnnnnnnnnnnnnnnnnnnnnnnnnnnnnnnnnnnnnnnnnnnnnnnnnnnnnnnnnnnnnnnnnnnnnnnnnnnnnnnnnnnnnnnnnnnnnnnnnnnnnnnnnnnnnnnnnnnnnnnnnnnnnnnnnnnnnnnnnnnnnnnnnnnnnnnnnnnnnnnnnnnnnnnnnnnnnnnnnnnnnnnnnnnnnnnnnnnnnnnnnnnnnnnnnnnnnnnnnnnnnnnnnnnnnnnnnnnnnnnnnnnnnnnnnnnnnnnnnnnnnnnnnnnnnnnnnnnnnnnnnnnnnnnnnnnnnnnnnnnnnnnnnnnnnnnnnnnnnnnnnnnnnnnnnnnnnnnnnnnnnnnnnnnnnnnnnnnnnnnnnnnnnnnnnnnnnnnnnnnnnnnnnnnnnnnnnnnnnnnnnnnnnnnnnnnnnnnnnnnnnnnnnnnnnnnnnnnnnnnnnnnnnnnnnnnnnnnnnnnnnnnnnnnnnnnnnnnnnnnnnnnnnnnnnnnnnnnnnnnnnnnnnnnnnnnnnnnnnnnnnnnnnnnnnnnnnnnnnnnnnnnnnnnnnnnnnnnnnnnnnnnnnnnnnnnnnnnnnnnnnnnnnnnnnnnnnnnnnnnnnnnnnnnnnnnnnnnnnnnnnnnnnnnnnnnnnnnnnnnnnnnnnnnnnnnnnnnnnnnnnnnnnnnnnnnnnnnnnnnnnnnnnnnnnnnnnnnnnnnnnnnnnnnnnnnnnnnnnnnnnnnnnnnnnnnnnnnnnnnnnnnnnnnnnnnnnnnnnnnnnnnnnnnnnnnnnnnnnnnnnnnnnnnnnnnnnnnnnnnnnnnnnnnnnnnnnnnnnnnnnnnnnnnnnnnnnnnnnnnnnnnnnnnnnnnnnnnnnnnnnnnnnnnnnnnnnnnnnnnnnnnnnnnnnnnnnnnnnnnnnnnnnnnnnnnnnnnnnnnnnnnnnnnnnnnnnnnnnnnnnnnnnnnnnnnnnnnnnnnnnnnnnnnnnnnnnnnnnnnnnnnnnnnnnnnnnnnnnnnnnnnnnnnnnnnnnnnnnnnnnnnnnnnnnnnnnnnnnnnnnnnnnnnnnnnnnnnnnnnnnnnnnnnnnnnnnnnnnnnnnnnnnnnnnnnnnnnnnnnnnnnnnnnnnnnnnnnnnnnnnnnnnnnnnnnnnnnnnnnnnnnnnnnnnnnnnnnnnnnnnnnnnnnnnnnnnnnnnnnnnnnnnnnnnnnnnnnnnnnnnnnnnnnnnnnnnnnnnnnnnnnnnnnnnnnnnnnnnnnnnnnnnnnnnnnnnnnnnnnnnnnnnnnnnnnnnnnnnnnnnnnnnnnnnnnnnnnnnnnnnnnnnnnnnnnnnnnnnnnnnnnnnnnnnnnnnnnnnnnnnnnnnnnnnnnnnnnnnnnnnnnnnnnnnnnnnnnnnnnnnnnnnnnnnnnnnnnnnnnnnnnnnnnnnnnnnnnnnnnnnnnnnnnnnnnnnnnnnnnnnnnnnnnnnnnnnnnnnnnnnnnnnnnnnnnnnnnnnnnnnnnnnnnnnnnnnnnnnnnnnnnnnnnnnnnnnnnnnnnnnnnnnnnnnnnnnnnnnnnnnnnnnnnnnnnnnnnnnnnnnnnnnnnnnnnnnnnnnnnnnnnnnnnnnnnnnnnnnnnnnnnnnnnnnnnnnnnnnnnnnnnnnnnnnnnnnnnnnnnnnnnnnnnnnnnnnnnnnnnnnnnnnnnnnnnnnnnnnnnnnnnnnnnnnnnnnnnnnnnnnnnnnnnnnnnnnnnnnnnnnnnnnnnnnnnnnnnnnnnnnnnnnnnnnnnnnnnnnnnnnnnnnnnnnnnnnnnnnnnnnnnnnnnnnnnnnnnnnnnnnnnnnnnnnnnnnnnnnnnnnnnnnnnnnnnnnnnnnnnnnnnnnnnnnnnnnnnnnnnnnnnnnnnnnnnnnnnnnnnnnnnnnnnnnnnnnnnnnnnnnnnnnnnnnnnnnnnnnnnnnnnnnnnnnnnnnnnnnnnnnnnnnnnnnnnnnnnnnnnnnnnnnnnnnnnnnnnnnnnnnnnnnnnnnnnnnnnnnnnnnnnnnnnnnnnnnnnnnnnnnnnnnnnnnnnnnnnnnnnnnnnnnnnnnnnnnnnnnnnnnnnnnnnnnnnnnnnnnnnnnnnnnnnnnnnnnnnnnnnnnnnnnnnnnnnnnnnnnnnnnnnnnnnnnnnnnnnnnnnnnnnnnnnnnnnnnnnnnnnnnnnnnnnnnnnnnnnnnnnnnnnnnnnnnnnnnnnnnnnnnnnnnnnnnnnnnnnnnnnnnnnnnnnnnnnnnnnnnnnnnnnnnnnnnnnnnnnnnnnnnnnnnnnnnnnnnnnnnnnnnnnnnnnnnnnnnnnnnnnnnnnnnnnnnnnnnnnnnnnnnnnnnnnnnnnnnnnnnnnnnnnnnnnnnnnnnnnnnnnnnnnnnnnnnnnnnnnnnnnnnnnnnnnnnnnnnnnnnnnnnnnnnnnnnnnnnnnnnnnnnnnnnnnnnnnnnnnnnnnnnnnnnnnnnnnnnnnnnnnnnnnnnnnnnnnnnnnnnnnnnnnnnnnnnnnnnnnnnnnnnnnnnnnnnnnnnnnnnnnnnnnnnnnnnnnnnnnnnnnnnnnnnnnnnnnnnnnnnnnnnnnnnnnnnnnnnnnnnnnnnnnnnnnnnnnnnnnnnnnnnnnnnnnnnnnnnnnnnnnnnnnnnnnnnnnnnnnnnnnnnnnnnnnnnnnnnnnnnnnnnnnnnnnnnnnnnnnnnnnnnnnnnnnnnnnnnnnnnnnnnnnnnnnnnnnnnnnnnnnnnnnnnnnnnnnnnnnnnnnnnnnnnnnnnnnnnnnnnnnnnnnnnnnnnnnnnnnnnnnnnnnnnnnnnnnnnnnnnnnnnnnnnnnnnnnnnnnnnnnnnnnnnnnnnnnnnnnnnnnnnnnnnnnnnnnnnnnnnnnnnnnnnnnnnnnnnnnnnnnnnnnnnnnnnnnnnnnnnnnnnnnnnnnnnnnnnnnnnnnnnnnnnnnnnnnnnnnnnnnnnnnnnnnnnnnnnnnnnnnnnnnnnnnnnnnnnnnnnnnnnnnnnnnnnnnnnnnnnnnnnnnnnnnnnnnnnnnnnnnnnnnnnnnnnnnnnnnnnnnnnnnnnnnnnnnnnnnnnnnnnnnnnnnnnnnnnnnnnnnnnnnnnnnnnnnnnnnnnnnnnnnnnnnnnnnnnnnnnnnnnnnnnnnnnnnnnnnnnnnnnnnnnnnnnnnnnnnnnnnnnnnnnnnnnnnnnnnnnnnnnnnnnnnnnnnnnnnnnnnnnnnnnnnnnnnnnnnnnnnnnnnnnnnnnnnnnnnnnnnnnnnnnnnnnnnnnnnnnnnnnnnnnnnnnnnnnnnnnnnnnnnnnnnnnnnnnnnnnnnnnnnnnnnnnnnnnnnnnnnnnnnnnnnnnnnnnnnnnnnnnnnnnnnnnnnnnnnnnnnnnnnnnnnnnnnnnnnnnnnnnnnnnnnnnnnnnnnnnnnnnnnnnnnnnnnnnnnnnnnnnnnnnnnnnnnnnnnnnnnnnnnnnnnnnnnnnnnnnnnnnnnnnnnnnnnnnnnnnnnnnnnnnnnnnnnnnnnnnnnnnnnnnnnnnnnnnnnnnnnnnnnnnnnnnnnnnnnnnnnnnnnnnnnnnnnnnnnnnnnnnnnnnnnnnnnnnnnnnnnnnnnnnnnnnnnnnnnnnnnnnnnnnnnnnnnnnnnnnnnnnnnnnnnnnnnnnnnnnnnnnnnnnnnnnnnnnnnnnnnnnnnnnnnnnnnnnnnnnnnnnnnnnnnnnnnnnnnnnnnnnnnnnnnnnnnnnnnnnnnnnnnnnnnnnnnnnnnnnnnnnnnnnnnnnnnnnnnnnnnnnnnnnnnnnnnnnnnnnnnnnnnnnnnnnnnnnnnnnnnnnnnnnnnnnnnnnnnnnnnnnnnnnnnnnnnnnnnnnnnnnnnnnnnnnnnnnnnnnnnnnnnnnnnnnnnnnnnnnnnnnnnnnnnnnnnnnnnnnnnnnnnnnnnnnnnnnnnnnnnnnnnnnnnnnnnnnnnnnnnnnnnnnnnnnnnnnnnnnnnnnnnnnnnnnnnnnnnnnnnnnnnnnnnnnnnnnnnnnnnnnnnnnnnnnnnnnnnnnnnnnnnnnnnnnnnnnnnnnnnnnnnnnnnnnnnnnnnnnnnnnnnnnnnnnnnnnnnnnnnnnnnnnnnnnnnnnnnnnnnnnnnnnnnnnnnnnnnnnnnnnnnnnnnnnnnnnnnnnnnnnnnnnnnnnnnnnnnnnnnnnnnnnnnnnnnnnnnnnnnnnnnnnnnnnnnnnnnnnnnnnnnnnnnnnnnnnnnnnnnnnnnnnnnnnnnnnnnnnnnnnnnnnnnnnnnnnnnnnnnnnnnnnnnnnnnnnnnnnnnnnnnnnnnnnnnnnnnnnnnnnnnnnnnnnnnnnnnnnnnnnnnnnnnnnnnnnnnnnnnnnnnnnnnnnnnnnnnnnnnnnnnnnnnnnnnnnnnnnnnnnnnnnnnnnnnnnnnnnnnnnnnnnnnnnnnnnnnnnnnnnnnnnnnnnnnnnnnnnnnnnnnnnnnnnnnnnnnnnnnnnnnnnnnnnnnnnnnnnnnnnnnnnnnnnnnnnnnnnnnnnnnnnnnnnnnnnnnnnnnnnnnnnnnnnnnnnnnnnnnnnnnnnnnnnnnnnnnnnnnnnnnnnnnnnnnnnnnnnnnnnnnnnnnnnnnnnnnnnnnnnnnnnnnnnnnnnnnnnnnnnnnnnnnnnnnnnnnnnnnnnnnnnnnnnnnnnnnnnnnnnnnnnnnnnnnnnnnnnnnnnnnnnnnnnnnnnnnnnnnnnnnnnnnnnnnnnnnnnnnnnnnnnnnnnnnnnnnnnnnnnnnnnnnnnnnnnnnnnnnnnnnnnnnnnnnnnnnnnnnnnnnnnnnnnnnnnnnnnnnnnnnnnnnnnnnnnnnnnnnnnnnnnnnnnnnnnnnnnnnnnnnnnnnnnnnnnnnnnnnnnnnnnnnnnnnnnnnnnnnnnnnnnnnnnnnnnnnnnnnnnnnnnnnnnnnnnnnnnnnnnnnnnnnnnnnnnnnnnnnnnnnnnnnnnnnnnnnnnnnnnnnnnnnnnnnnnnnnnnnnnnnnnnnnnnnnnnnnnnnnnnnnnnnnnnnnnnnnnnnnnnnnnnnnnnnnnnnnnnnnnnnnnnnnnnnnnnnnnnnnnnnnnnnnnnnnnnnnnnnnnnnnnnnnnnnnnnnnnnnnnnnnnnnnnnnnnnnnnnnnnnnnnnnnnnnnnnnnnnnnnnnnnnnnnnnnnnnnnnnnnnnnnnnnnnnnnnnnnnnnnnnnnnnnnnnnnnnnnnnnnnnnnnnnnnnnnnnnnnnnnnnnnnnnnnnnnnnnnnnnnnnnnnnnnnnnnnnnnnnnnnnnnnnnnnnnnnnnnnnnnnnnnnnnnnnnnnnnnnnnnnnnnnnnnnnnnnnnnnnnnnnnnnnnnnnnnnnnnnnnnnnnnnnnnnnnnnnnnnnnnnnnnnnnnnnnnnnnnnnnnnnnnnnnnnnnnnnnnnnnnnnnnnnnnnnnnnnnnnnnnnnnnnnnnnnnnnnnnnnnnnnnnnnnnnnnnnnnnnnnnnnnnnnnnnnnnnnnnnnnnnnnnnnnnnnnnnnnnnnnnnnnnnnnnnnnnnnnnnnnnnnnnnnnnnnnnnnnnnnnnnnnnnnnnnnnnnnnnnnnnnnnnnnnnnnnnnnnnnnnnnnnnnnnnnnnnnnnnnnnnnnnnnnnnnnnnnnnnnnnnnnnnnnnnnnnnnnnnnnnnnnnnnnnnnnnnnnnnnnnnnnnnnnnnnnnnnnnnnnnnnnnnnnnnnnnnnnnnnnnnnnnnnnnnnnnnnnnnnnnnnnnnnnnnnnnnnnnnnnnnnnnnnnnnnnnnnnnnnnnnnnnnnnnnnnnnnnnnnnnnnnnnnnnnnnnnnnnnnnnnnnnnnnnnnnnnnnnnnnnnnnnnnnnnnnnnnnnnnnnnnnnnnnnnnnnnnnnnnnnnnnnnnnnnnnnnnnnnnnnnnnnnnnnnnnnnnnnnnnnnnnnnnnnnnnnnnnnnnnnnnnnnnnnnnnnnnnnnnnnnnnnnnnnnnnnnnnnnnnnnnnnnnnnnnnnnnnnnnnnnnnnnnnnnnnnnnnnnnnnnnnnnnnnnnnnnnnnnnnnnnnnnnnnnnnnnnnnnnnnnnnnnnnnnnnnnnnnnnnnnnnnnnnnnnnnnnnnnnnnnnnnnnnnnnnnnnnnnnnnnnnnnnnnnnnnnnnnnnnnnnnnnnnnnnnnnnnnnnnnnnnnnnnnnnnnnnnnnnnnnnnnnnnnnnnnnnnnnnnnnnnnnnnnnnnnnnnnnnnnnnnnnnnnnnnnnnnnnnnnnnnnnnnnnnnnnnnnnnnnnnnnnnnnnnnnnnnnnnnnnnnnnnnnnnnnnnnnnnnnnnnnnnnnnnnnnnnnnnnnnnnnnnnnnnnnnnnnnnnnnnnnnnnnnnnnnnnnnnnnnnnnnnnnnnnnnnnnnnnnnnnnnnnnnnnnnnnnnnnnnnnnnnnnnnnnnnnnnnnnnnnnnnnnnnnnnnnnnnnnnnnnnnnnnnnnnnnnnnnnnnnnnnnnnnnnnnnnnnnnnnnnnnnnnnnnnnnnnnnnnnnnnnnnnnnnnnnnnnnnnnnnnnnnnnnnnnnnnnnnnnnnnnnnnnnnnnnnnnnnnnnnnnnnnnnnnnnnnnnnnnnnnnnnnnnnnnnnnnnnnnnnnnnnnnnnnnnnnnnnnnnnnnnnnnnnnnnnnnnnnnnnnnnnnnnnnnnnnnnnnnnnnnnnnnnnnnnnnnnnnnnnnnnnnnnnnnnnnnnnnnnnnnnnnnnnnnnnnnnnnnnnnnnnnnnnnnnnnnnnnnnnnnnnnnnnnnnnnnnnnnnnnnnnnnnnnnnnnnnnnnnnnnnnnnnnnnnnnnnnnnnnnnnnnnnnnnnnnnnnnnnnnnnnnnnnnnnnnnnnnnnnnnnnnnnnnnnnnnnnnnnnnnnnnnnnnnnnnnnnnnnnnnnnnnnnnnnnnnnnnnnnnnnnnnnnnnnnnnnnnnnnnnnnnnnnnnnnnnnnnnnnnnnnnnnnnnnnnnnnnnnnnnnnnnnnnnnnnnnnnnnnnnnnnnnnnnnnnnnnnnnnnnnnnnnnnnnnnnnnnnnnnnnnnnnnnnnnnnnnnnnnnnnnnnnnnnnnnnnnnnnnnnnnnnnnnnnnnnnnnnnnnnnnnnnnnnnnnnnnnnnnnnnnnnnnnnnnnnnnnnnnnnnnnnnnnnnnnnnnnnnnnnnnnnnnnnnnnnnnnnnnnnnnnnnnnnnnnnnnnnnnnnnnnnnnnnnnnnnnnnnnnnnnnnnnnnnnnnnnnnnnnnnnnnnnnnnnnnnnnnnnnnnnnnnnnnnnnnnnnnnnnnnnnnnnnnnnnnnnnnnnnnnnnnnnnnnnnnnnnnnnnnnnnnnnnnnnnnnnnnnnnnnnnnnnnnnnnnnnnnnnnnnnnnnnnnnnnnnnnnnnnnnnnnnnnnnnnnnnnnnnnnnnnnnnnnnnnnnnnnnnnnnnnnnnnnnnnnnnnnnnnnnnnnnnnnnnnnnnnnnnnnnnnnnnnnnnnnnnnnnnnnnnnnnnnnnnnnnnnnnnnnnnnnnnnnnnnnnnnnnnnnnnnnnnnnnnnnnnnnnnnnnnnnnnnnnnnnnnnnnnnnnnnnnnnnnnnnnnnnnnnnnnnnnnnnnnnnnnnnnnnnnnnnnnnnnnnnnnnnnnnnnnnnnnnnnnnnnnnnnnnnnnnnnnnnnnnnnnnnnnnnnnnnnnnnnnnnnnnnnnnnnnnnnnnnnnnnnnnnnnnnnnnnnnnnnnnnnnnnnnnnnnnnnnnnnnnnnnnnnnnnnnnnnnnnnnnnnnnnnnnnnnnnnnnnnnnnnnnnnnnnnnnnnnnnnnnnnnnnnnnnnnnnnnnnnnnnnnnnnnnnnnnnnnnnnnnnnnnnnnnnnnnnnnnnnnnnnnnnnnnnnnnnnnnnnnnnnnnnnnnnnnnnnnnnnnnnnnnnnnnnnnnnnnnnnnnnnnnnnnnnnnnnnnnnnnnnnnnnnnnnnnnnnnnnnnnnnnnnnnnnnnnnnnnnnnnnnnnnnnnnnnnnnnnnnnnnnnnnnnnnnnnnnnnnnnnnnnnnnnnnnnnnnnnnnnnnnnnnnnnnnnnnnnnnnnnnnnnnnnnnnnnnnnnnnnnnnnnnnnnnnnnnnnnnnnnnnnnnnnnnnnnnnnnnnnnnnnnnnnnnnnnnnnnnnnnnnnnnnnnnnnnnnnnnnnnnnnnnnnnnnnnnnnnnnnnnnnnnnnnnnnnnnnnnnnnnnnnnnnnnnnnnnnnnnnnnnnnnnnnnnnnnnnnnnnnnnnnnnnnnnnnnnnnnnnnnnnnnnnnnnnnnnnnnnnnnnnnnnnnnnnnnnnnnnnnnnnnnnnnnnnnnnnnnnnnnnnnnnnnnnnnnnnnnnnnnnnnnnnnnnnnnnnnnnnnnnnnnnnnnnnnnnnnnnnnnnnnnnnnnnnnnnnnnnnnnnnnnnnnnnnnnnnnnnnnnnnnnnnnnnnnnnnnnnnnnnnnnnnnnnnnnnnnnnnnnnnnnnnnnnnnnnnnnnnnnnnnnnnnnnnnnnnnnnnnnnnnnnnnnnnnnnnnnnnnnnnnnnnnnnnnnnnnnnnnnnnnnnnnnnnnnnnnnnnnnnnnnnnnnnnnnnnnnnnnnnnnnnnnnnnnnnnnnnnnnnnnnnnnnnnnnnnnnnnnnnnnnnnnnnnnnnnnnnnnnnnnnnnnnnnnnnnnnnnnnnnnnnnnnnnnnnnnnnnnnnnnnnnnnnnnnnnnnnnnnnnnnnnnnnnnnnnnnnnnnnnnnnnnnnnnnnnnnnnnnnnnnnnnnnnnnnnnnnnnnnnnnnnnnnnnnnnnnnnnnnnnnnnnnnnnnnnnnnnnnnnnnnnnnnnnnnnnnnnnnnnnnnnnnnnnnnnnnnnnnnnnnnnnnnnnnnnnnnnnnnnnnnnnnnnnnnnnnnnnnnnnnnnnnnnnnnnnnnnnnnnnnnnnnnnnnnnnnnnnnnnnnnnnnnnnnnnnnnnnnnnnnnnnnnnnnnnnnnnnnnnnnnnnnnnnnnnnnnnnnnnnnnnnnnnnnnnnnnnnnnnnnnnnnnnnnnnnnnnnnnnnnnnnnnnnnnnnnnnnnnnnnnnnnnnnnnnnnnnnnnnnnnnnnnnnnnnnnnnnnnnnnnnnnnnnnnnnnnnnnnnnnnnnnnnnnnnnnnnnnnnnnnnnnnnnnnnnnnnnnnnnnnnnnnnnnnnnnnnnnnnnnnnnnnnnnnnnnnnnnnnnnnnnnnnnnnnnnnnnnnnnnnnnnnnnnnnnnnnnnnnnnnnnnnnnnnnnnnnnnnnnnnnnnnnnnnnnnnnnnnnnnnnnnnnnnnnnnnnnnnnnnnnnnnnnnnnnnnnnnnnnnnnnnnnnnnnnnnnnnnnnnnnnnnnnnnnnnnnnnnnnnnnnnnnnnnnnnnnnnnnnnnnnnnnnnnnnnnnnnnnnnnnnnnnnnnnnnnnnnnnnnnnnnnnnnnnnnnnnnnnnnnnnnnnnnnnnnnnnnnnnnnnnnnnnnnnnnnnnnnnnnnnnnnnnnnnnnnnnnnnnnnnnnnnnnnnnnnnnnnnnnnnnnnnnnnnnnnnnnnnnnnnnnnnnnnnnnnnnnnnnnnnnnnnnnnnnnnnnnnnnnnnnnnnnnnnnnnnnnnnnnnnnnnnnnnnnnnnnnnnnnnnnnnnnnnnnnnnnnnnnnnnnnnnnnnnnnnnnnnnnnnnnnnnnnnnnnnnnnnnnnnnnnnnnnnnnnnnnnnnnnnnnnnnnnnnnnnnnnnnnnnnnnnnnnnnnnnnnnnnnnnnnnnnnnnnnnnnnnnnnnnnnnnnnnnnnnnnnnnnnnnnnnnnnnnnnnnnnnnnnnnnnnnnnnnnnnnnnnnnnnnnnnnnnnnnnnnnnnnnnnnnnnnnnnnnnnnnnnnnnnnnnnnnnnnnnnnnnnnnnnnnnnnnnnnnnnnnnnnnnnnnnnnnnnnnnnnnnnnnnnnnnnnnnnnnnnnnnnnnnnnnnnnnnnnnnnnnnnnnnnnnnnnnnnnnnnnnnnnnnnnnnnnnnnnnnnnnnnnnnnnnnnnnnnnnnnnnnnnnnnnnnnnnnnnnnnnnnnnnnnnnnnnnnnnnnnnnnnnnnnnnnnnnnnnnnnnnnnnnnnnnnnnnnnnnnnnnnnnnnnnnnnnnnnnnnnnnnnnnnnnnnnnnnnnnnnnnnnnnnnnnnnnnnnnnnnnnnnnnnnnnnnnnnnnnnnnnnnnnnnnnnnnnnnnnnnnnnnnnnnnnnnnnnnnnnnnnnnnnnnnnnnnnnnnnnnnnnnnnnnnnnnnnnnnnnnnnnnnnnnnnnnnnnnnnnnnnnnnnnnnnnnnnnnnnnnnnnnnnnnnnnnnnnnnnnnnnnnnnnnnnnnnnnnnnnnnnnnnnnnnnnnnnnnnnnnnnnnnnnnnnnnnnnnnnnnnnnnnnnnnnnnnnnnnnnnnnnnnnnnnnnnnnnnnnnnnnnnnnnnnnnnnnnnnnnnnnnnnnnnnnnnnnnnnnnnnnnnnnnnnnnnnnnnnnnnnnnnnnnnnnnnnnnnnnnnnnnnnnnnnnnnnnnnnnnnnnnnnnnnnnnnnnnnnnnnnnnnnnnnnnnnnnnnnnnnnnnnnnnnnnnnnnnnnnnnnnnnnnnnnnnnnnnnnnnnnnnnnnnnnnnnnnnnnnnnnnnnnnnnnnnnnnnnnnnnnnnnnnnnnnnnnnnnnnnnnnnnnnnnnnnnnnnnnnnnnnnnnnnnnnnnnnnnnnnnnnnnnnnnnnnnnnnnnnnnnnnnnnnnnnnnnnnnnnnnnnnnnnnnnnnnnnnnnnnnnnnnnnnnnnnnnnnnnnnnnnnnnnnnnnnnnnnnnnnnnnnnnnnnnnnnnnnnnnnnnnnnnnnnnnnnnnnnnnnnnnnnnnnnnnnnnnnnnnnnnnnnnnnnnnnnnnnnnnnnnnnnnnnnnnnnnnnnnnnnnnnnnnnnnnnnnnnnnnnnnnnnnnnnnnnnnnnnnnnnnnnnnnnnnnnnnnnnnnnnnnnnnnnnnnnnnnnnnnnnnnnnnnnnnnnnnnnnnnnnnnnnnnnnnnnnnnnnnnnnnnnnnnnnnnnnnnnnnnnnnnnnnnnnnnnnnnnnnnnnnnnnnnnnnnnnnnnnnnnnnnnnnnnnnnnnnnnnnnnnnnnnnnnnnnnnnnnnnnnnnnnnnnnnnnnnnnnnnnnnnnnnnnnnnnnnnnnnnnnnnnnnnnnnnnnnnnnnnnnnnnnnnnnnnnnnnnnnnnnnnnnnnnnnnnnnnnnnnnnnnnnnnnnnnnnnnnnnnnnnnnnnnnnnnnnnnnnnnnnnnnnnnnnnnnnnnnnnnnnnnnnnnnnnnnnnnnnnnnnnnnnnnnnnnnnnnnnnnnnnnnnnnnnnnnnnnnnnnnnnnnnnnnnnnnnnnnnnnnnnnnnnnnnnnnnnnnnnnnnnnnnnnnnnnnnnnnnnnnnnnnnnnnnnnnnnnnnnnnnnnnnnnnnnnnnnnnnnnnnnnnnnnnnnnnnnnnnnnnnnnnnnnnnnnnnnnnnnnnnnnnnnnnnnnnnnnnnnnnnnnnnnnnnnnnnnnnnnnnnnnnnnnnnnnnnnnnnnnnnnnnnnnnnnnnnnnnnnnnnnnnnnnnnnnnnnnnnnnnnnnnnnnnnnnnnnnnnnnnnnnnnnnnnnnnnnnnnnnnnnnnnnnnnnnnnnnnnnnnnnnnnnnnnnnnnnnnnnnnnnnnnnnnnnnnnnnnnnnnnnnnnnnnnnnnnnnnnnnnnnnnnnnnnnnnnnnnnnnnnnnnnnnnnnnnnnnnnnnnnnnnnnnnnnnnnnnnnnnnnnnnnnnnnnnnnnnnnnnnnnnnnnnnnnnnnnnnnnnnnnnnnnnnnnnnnnnnnnnnnnnnnnnnnnnnnnnnnnnnnnnnnnnnnnnnnnnnnnnnnnnnnnnnnnnnnnnnnnnnnnnnnnnnnnnnnnnnnnnnnnnnnnnnnnnnnnnnnnnnnnnnnnnnnnnnnnnnnnnnnnnnnnnnnnnnnnnnnnnnnnnnnnnnnnnnnnnnnnnnnnnnnnnnnnnnnnnnnnnnnnnnnnnnnnnnnnnnnnnnnnnnnnnnnnnnnnnnnnnnnnnnnnnnnnnnnnnnnnnnnnnnnnnnnnnnnnnnnnnnnnnnnnnnnnnnnnnnnnnnnnnnnnnnnnnnnnnnnnnnnnnnnnnnnnnnnnnnnnnnnnnnnnnnnnnnnnnnnnnnnnnnnnnnnnnnnnnnnnnnnnnnnnnnnnnnnnnnnnnnnnnnnnnnnnnnnnnnnnnnnnnnnnnnnnnnnnnnnnnnnnnnnnnnnnnnnnnnnnnnnnnnnnnnnnnnnnnnnnnnnnnnnnnnnnnnnnnnnnnnnnnnnnnnnnnnnnnnnnnnnnnnnnnnnnnnnnnnnnnnnnnnnnnnnnnnnnnnnnnnnnnnnnnnnnnnnnnnnnnnnnnnnnnnnnnnnnnnnnnnnnnnnnnnnnnnnnnnnnnnnnnnnnnnnnnnnnnnnnnnnnnnnnnnnnnnnnnnnnnnnnnnnnnnnnnnnnnnnnnnnnnnnnnnnnnnnnnnnnnnnnnnnnnnnnnnnnnnnnnnnnnnnnnnnnnnnnnnnnnnnnnnnnnnnnnnnnnnnnnnnnnnnnnnnnnnnnnnnnnnnnnnnnnnnnnnnnnnnnnnnnnnnnnnnnnnnnnnnnnnnnnnnnnnnnnnnnnnnnnnnnnnnnnnnnnnnnnnnnnnnnnnnnnnnnnnnnnnnnnnnnnnnnnnnnnnnnnnnnnnnnnnnnnnnnnnnnnnnnnnnnnnnnnnnnnnnnnnnnnnnnnnnnnnnnnnnnnnnnnnnnnnnnnnnnnnnnnnnnnnnnnnnnnnnnnnnnnnnnnnnnnnnnnnnnnnnnnnnnnnnnnnnnnnnnnnnnnnnnnnnnnnnnnnnnnnnnnnnnnnnnnnnnnnnnnnnnnnnnnnnnnnnnnnnnnnnnnnnnnnnnnnnnnnnnnnnnnnnnnnnnnnnnnnnnnnnnnnnnnnnnnnnnnnnnnnnnnnnnnnnnnnnnnnnnnnnnnnnnnnnnnnnnnnnnnnnnnnnnnnnnnnnnnnnnnnnnnnnnnnnnnnnnnnnnnnnnnnnnnnnnnnnnnnnnnnnnnnnnnnnnnnnnnnnnnnnnnnnnnnnnnnnnnnnnnnnnnnnnnnnnnnnnnnnnnnnnnnnnnnnnnnnnnnnnnnnnnnnnnnnnnnnnnnnnnnnnnnnnnnnnnnnnnnnnnnnnnnnnnnnnnnnnnnnnnnnnnnnnnnnnnnnnnnnnnnnnnnnnnnnnnnnnnnnnnnnnnnnnnnnnnnnnnnnnnnnnnnnnnnnnnnnnnnnnnnnnnnnnnnnnnnnnnnnnnnnnnnnnnnnnnnnnnnnnnnnnnnnnnnnnnnnnnnnnnnnnnnnnnnnnnnnnnnnnnnnnnnnnnnnnnnnnnnnnnnnnnnnnnnnnnnnnnnnnnnnnnnnnnnnnnnnnnnnnnnnnnnnnnnnnnnnnnnnnnnnnnnnnnnnnnnnnnnnnnnnnnnnnnnnnnnnnnnnnnnnnnnnnnnnnnnnnnnnnnnnnnnnnnnnnnnnnnnnnnnnnnnnnnnnnnnnnnnnnnnnnnnnnnnnnnnnnnnnnnnnnnnnnnnnnnnnnnnnnnnnnnnnnnnnnnnnnnnnnnnnnnnnnnnnnnnnnnnnnnnnnnnnnnnnnnnnnnnnnnnnnnnnnnnnnnnnnnnnnnnnnnnnnnnnnnnnnnnnnnnnnnnnnnnnnnnnnnnnnnnnnnnnnnnnnnnnnnnnnnnnnnnnnnnnnnnnnnnnnnnnnnnnnnnnnnnnnnnnnnnnnnnnnnnnnnnnnnnnnnnnnnnnnnnnnnnnnnnnnnnnnnnnnnnnnnnnnnnnnnnnnnnnnnnnnnnnnnnnnnnnnnnnnnnnnnnnnnnnnnnnnnnnnnnnnnnnnnnnnnnnnnnnnnnnnnnnnnnnnnnnnnnnnnnnnnnnnnnnnnnnnnnnnnnnnnnnnnnnnnnnnnnnnnnnnnnnnnnnnnnnnnnnnnnnnnnnnnnnnnnnnnnnnnnnnnnnnnnnnnnnnnnnnnnnnnnnnnnnnnnnnnnnnnnnnnnnnnnnnnnnnnnnnnnnnnnnnnnnnnnnnnnnnnnnnnnnnnnnnnnnnnnnnnnnnnnnnnnnnnnnnnnnnnnnnnnnnnnnnnnnnnnnnnnnnnnnnnnnnnnnnnnnnnnnnnnnnnnnnnnnnnnnnnnnnnnnnnnnnnnnnnnnnnnnnnnnnnnnnnnnnnnnnnnnnnnnnnnnnnnnnnnnnnnnnnnnnnnnnnnnnnnnnnnnnnnnnnnnnnnnnnnnnnnnnnnnnnnnnnnnnnnnnnnnnnnnnnnnnnnnnnnnnnnnnnnnnnnnnnnnnnnnnnnnnnnnnnnnnnnnnnnnnnnnnnnnnnnnnnnnnnnnnnnnnnnnnnnnnnnnnnnnnnnnnnnnnnnnnnnnnnnnnnnnnnnnnnnnnnnnnnnnnnnnnnnnnnnnnnnnnnnnnnnnnnnnnnnnnnnnnnnnnnnnnnnnnnnnnnnnnnnnnnnnnnnnnnnnnnnnnnnnnnnnnnnnnnnnnnnnnnnnnnnnnnnnnnnnnnnnnnnnnnnnnnnnnnnnnnnnnnnnnnnnnnnnnnnnnnnnnnnnnnnnnnnnnnnnnnnnnnnnnnnnnnnnnnnnnnnnnnnnnnnnnnnnnnnnnnnnnnnnnnnnnnnnnnnnnnnnnnnnnnnnnnnnnnnnnnnnnnnnnnnnnnnnnnnnnnnnnnnnnnnnnnnnnnnnnnnnnnnnnnnnnnnnnnnnnnnnnnnnnnnnnnnnnnnnnnnnnnnnnnnnnnnnnnnnnnnnnnnnnnnnnnnnnnnnnnnnnnnnnnnnnnnnnnnnnnnnnnnnnnnnnnnnnnnnnnnnnnnnnnnnnnnnnnnnnnnnnnnnnnnnnnnnnnnnnnnnnnnnnnnnnnnnnnnnnnnnnnnnnnnnnnnnnnnnnnnnnnnnnnnnnnnnnnnnnnnnnnnnnnnnnnnnnnnnnnnnnnnnnnnnnnnnnnnnnnnnnnnnnnnnnnnnnnnnnnnnnnnnnnnnnnnnnnnnnnnnnnnnnnnnnnnnnnnnnnnnnnnnnnnnnnnnnnnnnnnnnnnnnnnnnnnnnnnnnnnnnnnnnnnnnnnnnnnnnnnnnnnnnnnnnnnnnnnnnnnnnnnnnnnnnnnnnnnnnnnnnnnnnnnnnnnnnnnnnnnnnnnnnnnnnnnnnnnnnnnnnnnnnnnnnnnnnnnnnnnnnnnnnnnnnnnnnnnnnnnnnnnnnnnnnnnnnnnnnnnnnnnnnnnnnnnnnnnnnnnnnnnnnnnnnnnnnnnnnnnnnnnnnnnnnnnnnnnnnnnnnnnnnnnnnnnnnnnnnnnnnnnnnnnnnnnnnnnnnnnnnnnnnnnnnnnnnnnnnnnnnnnnnnnnnnnnnnnnnnnnnnnnnnnnnnnnnnnnnnnnnnnnnnnnnnnnnnnnnnnnnnnnnnnnnnnnnnnnnnnnnnnnnnnnnnnnnnnnnnnnnnnnnnnnnnnnnnnnnnnnnnnnnnnnnnnnnnnnnnnnnnnnnnnnnnnnnnnnnnnnnnnnnnnnnnnnnnnnnnnnnnnnnnnnnnnnnnnnnnnnnnnnnnnnnnnnnnnnnnnnnnnnnnnnnnnnnnnnnnnnnnnnnnnnnnnnnnnnnnnnnnnnnnnnnnnnnnnnnnnnnnnnnnnnnnnnnnnnnnnnnnnnnnnnnnnnnnnnnnnnnnnnnnnnnnnnnnnnnnnnnnnnnnnnnnnnnnnnnnnnnnnnnnnnnnnnnnnnnnnnnnnnnnnnnnnnnnnnnnnnnnnnnnnnnnnnnnnnnnnnnnnnnnnnnnnnnnnnnnnnnnnnnnnnnnnnnnnnnnnnnnnnnnnnnnnnnnnnnnnnnnnnnnnnnnnnnnnnnnnnnnnnnnnnnnnnnnnnnnnnnnnnnnnnnnnnnnnnnnnnnnnnnnnnnnnnnnnnnnnnnnnnnnnnnnnnnnnnnnnnnnnnnnnnnnnnnnnnnnnnnnnnnnnnnnnnnnnnnnnnnnnnnnnnnnnnnnnnnnnnnnnnnnnnnnnnnnnnnnnnnnnnnnnnnnnnnnnnnnnnnnnnnnnnnnnnnnnnnnnnnnnnnnnnnnnnnnnnnnnnnnnnnnnnnnnnnnnnnnnnnnnnnnnnnnnnnnnnnnnnnnnnnnnnnnnnnnnnnnnnnnnnnnnnnnnnnnnnnnnnnnnnnnnnnnnnnnnnnnnnnnnnnnnnnnnnnnnnnnnnnnnnnnnnnnnnnnnnnnnnnnnnnnnnnnnnnnnnnnnnnnnnnnnnnnnnnnnnnnnnnnnnnnnnnnnnnnnnnnnnnnnnnnnnnnnnnnnnnnnnnnnnnnnnnnnnnnnnnnnnnnnnnnnnnnnnnnnnnnnnnnnnnnnnnnnnnnnnnnnnnnnnnnnnnnnnnnnnnnnnnnnnnnnnnnnnnnnnnnnnnnnnnnnnnnnnnnnnnnnnnnnnnnnnnnnnnnnnnnnnnnnnnnnnnnnnnnnnnnnnnnnnnnnnnnnnnnnnnnnnnnnnnnnnnnnnnnnnnnnnnnnnnnnnnnnnnnnnnnnnnnnnnnnnnnnnnnnnnnnnnnnnnnnnnnnnnnnnnnnnnnnnnnnnnnnnnnnnnnnnnnnnnnnnnnnnnnnnnnnnnnnnnnnnnnnnnnnnnnnnnnnnnnnnnnnnnnnnnnnnnnnnnnnnnnnnnnnnnnnnnnnnnnnnnnnnnnnnnnnnnnnnnnnnnnnnnnnnnnnnnnnnnnnnnnnnnnnnnnnnnnnnnnnnnnnnnnnnnnnnnnnnnnnnnnnnnnnnnnnnnnnnnnnnnnnnnnnnnnnnnnnnnnnnnnnnnnnnnnnnnnnnnnnnnnnnnnnnnnnnnnnnnnnnnnnnnnnnnnnnnnnnnnnnnnnnnnnnnnnnnnnnnnnnnnnnnnnnnnnnnnnnnnnnnnnnnnnnnnnnnnnnnnnnnnnnnnnnnnnnnnnnnnnnnnnnnnnnnnnnnnnnnnnnnnnnnnnnnnnnnnnnnnnnnnnnnnnnnnnnnnnnnnnnnnnnnnnnnnnnnnnnnnnnnnnnnnnnnnnnnnnnnnnnnnnnnnnnnnnnnnnnnnnnnnnnnnnnnnnnnnnnnnnnnnnnnnnnnnnnnnnnnnnnnnnnnnnnnnnnnnnnnnnnnnnnnnnnnnnnnnnnnnnnnnnnnnnnnnnnnnnnnnnnnnnnnnnnnnnnnnnnnnnnnnnnnnnnnnnnnnnnnnnnnnnnnnnnnnnnnnnnnnnnnnnnnnnnnnnnnnnnnnnnnnnnnnnnnnnnnnnnnnnnnnnnnnnnnnnnnnnnnnnnnnnnnnnnnnnnnnnnnnnnnnnnnnnnnnnnnnnnnnnnnnnnnnnnnnnnnnnnnnnnnnnnnnnnnnnnnnnnnnnnnnnnnnnnnnnnnnnnnnnnnnnnnnnnnnnnnnnnnnnnnnnnnnnnnnnnnnnnnnnnnnnnnnnnnnnnnnnnnnnnnnnnnnnnnnnnnnnnnnnnnnnnnnnnnnnnnnnnnnnnnnnnnnnnnnnnnnnnnnnnnnnnnnnnnnnnnnnnnnnnnnnnnnnnnnnnnnnnnnnnnnnnnnnnnnnnnnnnnnnnnnnnnnnnnnnnnnnnnnnnnnnnnnnnnnnnnnnnnnnnnnnnnnnnnnnnnnnnnnnnnnnnnnnnnnnnnnnnnnnnnnnnnnnnnnnnnnnnnnnnnnnnnnnnnnnnnnnnnnnnnnnnnnnnnnnnnnnnnnnnnnnnnnnnnnnnnnnnnnnnnnnnnnnnnnnnnnnnnnnnnnnnnnnnnnnnnnnnnnnnnnnnnnnnnnnnnnnnnnnnnnnnnnnnnnnnnnnnnnnnnnnnnnnnnnnnnnnnnnnnnnnnnnnnnnnnnnnnnnnnnnnnnnnnnnnnnnnnnnnnnnnnnnnnnnnnnnnnnnnnnnnnnnnnnnnnnnnnnnnnnnnnnnnnnnnnnnnnnnnnnnnnnnnnnnnnnnnnnnnnnnnnnnnnnnnnnnnnnnnnnnnnnnnnnnnnnnnnnnnnnnnnnnnnnnnnnnnnnnnnnnnnnnnnnnnnnnnnnnnnnnnnnnnnnnnnnnnnnnnnnnnnnnnnnnnnnnnnnnnnnnnnnnnnnnnnnnnnnnnnnnnnnnnnnnnnnnnnnnnnnnnnnnnnnnnnnnnnnnnnnnnnnnnnnnnnnnnnnnnnnnnnnnnnnnnnnnnnnnnnnnnnnnnnnnnnnnnnnnnnnnnnnnnnnnnnnnnnnnnnnnnnnnnnnnnnnnnnnnnnnnnnnnnnnnnnnnnnnnnnnnnnnnnnnnnnnnnnnnnnnnnnnnnnnnnnnnnnnnnnnnnnnnnnnnnnnnnnnnnnnnnnnnnnnnnnnnnnnnnnnnnnnnnnnnnnnnnnnnnnnnnnnnnnnnnnnnnnnnnnnnnnnnnnnnnnnnnnnnnnnnnnnnnnnnnnnnnnnnnnnnnnnnnnnnnnnnnnnnnnnnnnnnnnnnnnnnnnnnnnnnnnnnnnnnnnnnnnnnnnnnnnnnnnnnnnnnnnnnnnnnnnnnnnnnnnnnnnnnnnnnnnnnnnnnnnnnnnnnnnnnnnnnnnnnnnnnnnnnnnnnnnnnnnnnnnnnnnnnnnnnnnnnnnnnnnnnnnnnnnnnnnnnnnnnnnnnnnnnnnnnnnnnnnnnnnnnnnnnnnnnnnnnnnnnnnnnnnnnnnnnnnnnnnnnnnnnnnnnnnnnnnnnnnnnnnnnnnnnnnnnnnnnnnnnnnnnnnnnnnnnnnnnnnnnnnnnnnnnnnnnnnnnnnnnnnnnnnnnnnnnnnnnnnnnnnnnnnnnnnnnnnnnnnnnnnnnnnnnnnnnnnnnnnnnnnnnnnnnnnnnnnnnnnnnnnnnnnnnnnnnnnnnnnnnnnnnnnnnnnnnnnnnnnnnnnnnnnnnnnnnnnnnnnnnnnnnnnnnnnnnnnnnnnnnnnnnnnnnnnnnnnnnnnnnnnnnnnnnnnnnnnnnnnnnnnnnnnnnnnnnnnnnnnnnnnnnnnnnnnnnnnnnnnnnnnnnnnnnnnnnnnnnnnnnnnnnnnnnnnnnnnnnnnnnnnnnnnnnnnnnnnnnnnnnnnnnnnnnnnnnnnnnnnnnnnnnnnnnnnnnnnnnnnnnnnnnnnnnnnnnnnnnnnnnnnnnnnnnnnnnnnnnnnnnnnnnnnnnnnnnnnnnnnnnnnnnnnnnnnnnnnnnnnnnnnnnnnnnnnnnnnnnnnnnnnnnnnnnnnnnnnnnnnnnnnnnnnnnnnnnnnnnnnnnnnnnnnnnnnnnnnnnnnnnnnnnnnnnnnnnnnnnnnnnnnnnnnnnnnnnnnnnnnnnnnnnnnnnnnnnnnnnnnnnnnnnnnnnnnnnnnnnnnnnnnnnnnnnnnnnnnnnnnnnnnnnnnnnnnnnnnnnnnnnnnnnnnnnnnnnnnnnnnnnnnnnnnnnnnnnnnnnnnnnnnnnnnnnnnnnnnnnnnnnnnnnnnnnnnnnnnnnnnnnnnnnnnnnnnnnnnnnnnnnnnnnnnnnnnnnnnnnnnnnnnnnnnnnnnnnnnnnnnnnnnnnnnnnnnnnnnnnnnnnnnnnnnnnnnnnnnnnnnnnnnnnnnnnnnnnnnnnnnnnnnnnnnnnnnnnnnnnnnnnnnnnnnnnnnnnnnnnnnnnnnnnnnnnnnnnnnnnnnnnnnnnnnnnnnnnnnnnnnnnnnnnnnnnnnnnnnnnnnnnnnnnnnnnnnnnnnnnnnnnnnnnnnnnnnnnnnnnnnnnnnnnnnnnnnnnnnnnnnnnnnnnnnnnnnnnnnnnnnnnnnnnnnnnnnnnnnnnnnnnnnnnnnnnnnnnnnnnnnnnnnnnnnnnnnnnnnnnnnnnnnnnnnnnnnnnnnnnnnnnnnnnnnnnnnnnnnnnnnnnnnnnnnnnnnnnnnnnnnnnnnnnnnnnnnnnnnnnnnnnnnnnnnnnnnnnnnnnnnnnnnnnnnnnnnnnnnnnnnnnnnnnnnnnnnnnnnnnnnnnnnnnnnnnnnnnnnnnnnnnnnnnnnnnnnnnnnnnnnnnnnnnnnnnnnnnnnnnnnnnnnnnnnnnnnnnnnnnnnnnnnnnnnnnnnnnnnnnnnnnnnnnnnnnnnnnnnnnnnnnnnnnnnnnnnnnnnnnnnnnnnnnnnnnnnnnnnnnnnnnnnnnnnnnnnnnnnnnnnnnnnnnnnnnnnnnnnnnnnnnnnnnnnnnnnnnnnnnnnnnnnnnnnnnnnnnnnnnnnnnnnnnnnnnnnnnnnnnnnnnnnnnnnnnnnnnnnnnnnnnnnnnnnnnnnnnnnnnnnnnnnnnnnnnnnnnnnnnnnnnnnnnnnnnnnnnnnnnnnnnnnnnnnnnnnnnnnnnnnnnnnnnnnnnnnnnnnnnnnnnnnnnnnnnnnnnnnnnnnnnnnnnnnnnnnnnnnnnnnnnnnnnnnnnnnnnnnnnnnnnnnnnnnnnnnnnnnnnnnnnnnnnnnnnnnnnnnnnnnnnnnnnnnnnnnnnnnnnnnnnnnnnnnnnnnnnnnnnnnnnnnnnnnnnnnnnnnnnnnnnnnnnnnnnnnnnnnnnnnnnnnnnnnnnnnnnnnnnnnnnnnnnnnnnnnnnnnnnnnnnnnnnnnnnnnnnnnnnnnnnnnnnnnnnnnnnnnnnnnnnnnnnnnnnnnnnnnnnnnnnnnnnnnnnnnnnnnnnnnnnnnnnnnnnnnnnnnnnnnnnnnnnnnnnnnnnnnnnnnnnnnnnnnnnnnnnnnnnnnnnnnnnnnnnnnnnnnnnnnnnnnnnnnnnnnnnnnnnnnnnnnnnnnnnnnnnnnnnnnnnnnnnnnnnnnnnnnnnnnnnnnnnnnnnnnnnnnnnnnnnnnnnnnnnnnnnnnnnnnnnnnnnnnnnnnnnnnnnnnnnnnnnnnnnnnnnnnnnnnnnnnnnnnnnnnnnnnnnnnnnnnnnnnnnnnnnnnnnnnnnnnnnnnnnnnnnnnnnnnnnnnnnnnnnnnnnnnnnnnnnnnnnnnnnnnnnnnnnnnnnnnnnnnnnnnnnnnnnnnnnnnnnnnnnnnnnnnnnnnnnnnnnnnnnnnnnnnnnnnnnnnnnnnnnnnnnnnnnnnnnnnnnnnnnnnnnnnnnnnnnnnnnnnnnnnnnnnnnnnnnnnnnnnnnnnnnnnnnnnnnnnnnnnnnnnnnnnnnnnnnnnnnnnnnnnnnnnnnnnnnnnnnnnnnnnnnnnnnnnnnnnnnnnnnnnnnnnnnnnnnnnnnnnnnnnnnnnnnnnnnnnnnnnnnnnnnnnnnnnnnnnnnnnnnnnnnnnnnnnnnnnnnnnnnnnnnnnnnnnnnnnnnnnnnnnnnnnnnnnnnnnnnnnnnnnnnnnnnnnnnnnnnnnnnnnnnnnnnnnnnnnnnnnnnnnnnnnnnnnnnnnnnnnnnnnnnnnnnnnnnnnnnnnnnnnnnnnnnnnnnnnnnnnnnnnnnnnnnnnnnnnnnnnnnnnnnnnnnnnnnnnnnnnnnnnnnnnnnnnnnnnnnnnnnnnnnnnnnnnnnnnnnnnnnnnnnnnnnnnnnnnnnnnnnnnnnnnnnnnnnnnnnnnnnnnnnnnnnnnnnnnnnnnnnnnnnnnnnnnnnnnnnnnnnnnnnnnnnnnnnnnnnnnnnnnnnnnnnnnnnnnnnnnnnnnnnnnnnnnnnnnnnnnnnnnnnnnnnnnnnnnnnnnnnnnnnnnnnnnnnnnnnnnnnnnnnnnnnnnnnnnnnnnnnnnnnnnnnnnnnnnnnnnnnnnnnnnnnnnnnnnnnnnnnnnnnnnnnnnnnnnnnnnnnnnnnnnnnnnnnnnnnnnnnnnnnnnnnnnnnnnnnnnnnnnnnnnnnnnnnnnnnnnnnnnnnnnnnnnnnnnnnnnnnnnnnnnnnnnnnnnnnnnnnnnnnnnnnnnnnnnnnnnnnnnnnnnnnnnnnnnnnnnnnnnnnnnnnnnnnnnnnnnnnnnnnnnnnnnnnnnnnnnnnnnnnnnnnnnnnnnnnnnnnnnnnnnnnnnnnnnnnnnnnnnnnnnnnnnnnnnnnnnnnnnnnnnnnnnnnnnnnnnnnnnnnnnnnnnnnnnnnnnnnnnnnnnnnnnnnnnnnnnnnnnnnnnnnnnnnnnnnnnnnnnnnnnnnnnnnnnnnnnnnnnnnnnnnnnnnnnnnnnnnnnnnnnnnnnnnnnnnnnnnnnnnnnnnnnnnnnnnnnnnnnnnnnnnnnnnnnnnnnnnnnnnnnnnnnnnnnnnnnnnnnnnnnnnnnnnnnnnnnnnnnnnnnnnnnnnnnnnnnnnnnnnnnnnnnnnnnnnnnnnnnnnnnnnnnnnnnnnnnnnnnnnnnnnnnnnnnnnnnnnnnnnnnnnnnnnnnnnnnnnnnnnnnnnnnnnnnnnnnnnnnnnnnnnnnnnnnnnnnnnnnnnnnnnnnnnnnnnnnnnnnnnnnnnnnnnnnnnnnnnnnnnnnnnnnnnnnnnnnnnnnnnnnnnnnnnnnnnnnnnnnnnnnnnnnnnnnnnnnnnnnnnnnnnnnnnnnnnnnnnnnnnnnnnnnnnnnnnnnnnnnnnnnnnnnnnnnnnnnnnnnnnnnnnnnnnnnnnnnnnnnnnnnnnnnnnnnnnnnnnnnnnnnnnnnnnnnnnnnnnnnnnnnnnnnnnnnnnnnnnnnnnnnnnnnnnnnnnnnnnnnnnnnnnnnnnnnnnnnnnnnnnnnnnnnnnnnnnnnnnnnnnnnnnnnnnnnnnnnnnnnnnnnnnnnnnnnnnnnnnnnnnnnnnnnnnnnnnnnnnnnnnnnnnnnnnnnnnnnnnnnnnnnnnnnnnnnnnnnnnnnnnnnnnnnnnnnnnnnnnnnnnnnnnnnnnnnnnnnnnnnnnnnnnnnnnnnnnnnnnnnnnnnnnnnnnnnnnnnnnnnnnnnnnnnnnnnnnnnnnnnnnnnnnnnnnnnnnnnnnnnnnnnnnnnnnnnnnnnnnnnnnnnnnnnnnnnnnnnnnnnnnnnnnnnnnnnnnnnnnnnnnnnnnnnnnnnnnnnnnnnnnnnnnnnnnnnnnnnnnnnnnnnnnnnnnnnnnnnnnnnnnnnnnnnnnnnnnnnnnnnnnnnnnnnnnnnnnnnnnnnnnnnnnnnnnnnnnnnnnnnnnnnnnnnnnnnnnnnnnnnnnnnnnnnnnnnnnnnnnnnnnnnnnnnnnnnnnnnnnnnnnnnnnnnnnnnnnnnnnnnnnnnnnnnnnnnnnnnnnnnnnnnnnnnnnnnnnnnnnnnnnnnnnnnnnnnnnnnnnnnnnnnnnnnnnnnnnnnnnnnnnnnnnnnnnnnnnnnnnnnnnnnnnnnnnnnnnnnnnnnnnnnnnnnnnnnnnnnnnnnnnnnnnnnnnnnnnnnnnnnnnnnnnnnnnnnnnnnnnnnnnnnnnnnnnnnnnnnnnnnnnnnnnnnnnnnnnnnnnnnnnnnnnnnnnnnnnnnnnnnnnnnnnnnnnnnnnnnnnnnnnnnnnnnnnnnnnnnnnnnnnnnnnnnnnnnnnnnnnnnnnnnnnnnnnnnnnnnnnnnnnnnnnnnnnnnnnnnnnnnnnnnnnnnnnnnnnnnnnnnnnnnnnnnnnnnnnnnnnnnnnnnnnnnnnnnnnnnnnnnnnnnnnnnnnnnnnnnnnnnnnnnnnnnnnnnnnnnnnnnnnnnnnnnnnnnnnnnnnnnnnnnnnnnnnnnnnnnnnnnnnnnnnnnnnnnnnnnnnnnnnnnnnnnnnnnnnnnnnnnnnnnnnnnnnnnnnnnnnnnnnnnnnnnnnnnnnnnnnnnnnnnnnnnnnnnnnnnnnnnnnnnnnnnnnnnnnnnnnnnnnnnnnnnnnnnnnnnnnnnnnnnnnnnnnnnnnnnnnnnnnnnnnnnnnnnnnnnnnnnnnnnnnnnnnnnnnnnnnnnnnnnnnnnnnnnnnnnnnnnnnnnnnnnnnnnnnnnnnnnnnnnnnnnnnnnnnnnnnnnnnnnnnnnnnnnnnnnnnnnnnnnnnnnnnnnnnnnnnnnnnnnnnnnnnnnnnnnnnnnnnnnnnnnnnnnnnnnnnnnnnnnnnnnnnnnnnnnnnnnnnnnnnnnnnnnnnnnnnnnnnnnnnnnnnnnnnnnnnnnnnnnnnnnnnnnnnnnnnnnnnnnnnnnnnnnnnnnnnnnnnnnnnnnnnnnnnnnnnnnnnnnnnnnnnnnnnnnnnnnnnnnnnnnnnnnnnnnnnnnnnnnnnnnnnnnnnnnnnnnnnnnnnnnnnnnnnnnnnnnnnnnnnnnnnnnnnnnnnnnnnnnnnnnnnnnnnnnnnnnnnnnnnnnnnnnnnnnnnnnnnnnnnnnnnnnnnnnnnnnnnnnnnnnnnnnnnnnnnnnnnnnnnnnnnnnnnnnnnnnnnnnnnnnnnnnnnnnnnnnnnnnnnnnnnnnnnnnnnnnnnnnnnnnnnnnnnnnnnnnnnnnnnnnnnnnnnnnnnnnnnnnnnnnnnnnnnnnnnnnnnnnnnnnnnnnnnnnnnnnnnnnnnnnnnnnnnnnnnnnnnnnnnnnnnnnnnnnnnnnnnnnnnnnnnnnnnnnnnnnnnnnnnnnnnnnnnnnnnnnnnnnnnnnnnnnnnnnnnnnnnnnnnnnnnnnnnnnnnnnnnnnnnnnnnnnnnnnnnnnnnnnnnnnnnnnnnnnnnnnnnnnnnnnnnnnnnnnnnnnnnnnnnnnnnnnnnnnnnnnnnnnnnnnnnnnnnnnnnnnnnnnnnnnnnnnnnnnnnnnnnnnnnnnnnnnnnnnnnnnnnnnnnnnnnnnnnnnnnnnnnnnnnnnnnnnnnnnnnnnnnnnnnnnnnnnnnnnnnnnnnnnnnnnnnnnnnnnnnnnnnnnnnnnnnnnnnnnnnnnnnnnnnnnnnnnnnnnnnnnnnnnnnnnnnnnnnnnnnnnnnnnnnnnnnnnnnnnnnnnnnnnnnnnnnnnnnnnnnnnnnnnnnnnnnnnnnnnnnnnnnnnnnnnnnnnnnnnnnnnnnnnnnnnnnnnnnnnnnnnnnnnnnnnnnnnnnnnnnnnnnnnnnnnnnnnnnnnnnnnnnnnnnnnnnnnnnnnnnnnnnnnnnnnnnnnnnnnnnnnnnnnnnnnnnnnnnnnnnnnnnnnnnnnnnnnnnnnnnnnnnnnnnnnnnnnnnnnnnnnnnnnnnnnnnnnnnnnnnnnnnnnnnnnnnnnnnnnnnnnnnnnnnnnnnnnnnnnnnnnnnnnnnnnnnnnnnnnnnnnnnnnnnnnnnnnnnnnnnnnnnnnnnnnnnnnnnnnnnnnnnnnnnnnnnnnnnnnnnnnnnnnnnnnnnnnnnnnnnnnnnnnnnnnnnnnnnnnnnnnnnnnnnnnnnnnnnnnnnnnnnnnnnnnnnnnnnnnnnnnnnnnnnnnnnnnnnnnnnnnnnnnnnnnnnnnnnnnnnnnnnnnnnnnnnnnnnnnnnnnnnnnnnnnnnnnnnnnnnnnnnnnnnnnnnnnnnnnnnnnnnnnnnnnnnnnnnnnnnnnnnnnnnnnnnnnnnnnnnnnnnnnnnnnnnnnnnnnnnnnnnnnnnnnnnnnnnnnnnnnnnnnnnnnnnnnnnnnnnnnnnnnnnnnnnnnnnnnnnnnnnnnnnnnnnnnnnnnnnnnnnnnnnnnnnnnnnnnnnnnnnnnnnnnnnnnnnnnnnnnnnnnnnnnnnnnnnnnnnnnnnnnnnnnnnnnnnnnnnnnnnnnnnnnnnnnnnnnnnnnnnnnnnnnnnnnnnnnnnnnnnnnnnnnnnnnnnnnnnnnnnnnnnnnnnnnnnnnnnnnnnnnnnnnnnnnnnnnnnnnnnnnnnnnnnnnnnnnnnnnnnnnnnnnnnnnnnnnnnnnnnnnnnnnnnnnnnnnnnnnnnnnnnnnnnnnnnnnnnnnnnnnnnnnnnnnnnnnnnnnnnnnnnnnnnnnnnnnnnnnnnnnnnnnnnnnnnnnnnnnnnnnnnnnnnnnnnnnnnnnnnnnnnnnnnnnnnnnnnnnnnnnnnnnnnnnnnnnnnnnnnnnnnnnnnnnnnnnnnnnnnnnnnnnnnnnnnnnnnnnnnnnnnnnnnnnnnnnnnnnnnnnnnnnnnnnnnnnnnnnnnnnnnnnnnnnnnnnnnnnnnnnnnnnnnnnnnnnnnnnnnnnnnnnnnnnnnnnnnnnnnnnnnnnnnnnnnnnnnnnnnnnnnnnnnnnnnnnnnnnnnnnnnnnnnnnnnnnnnnnnnnnnnnnnnnnnnnnnnnnnnnnnnnnnnnnnnnnnnnnnnnnnnnnnnnnnnnnnnnnnnnnnnnnnnnnnnnnnnnnnnnnnnnnnnnnnnnnnnnnnnnnnnnnnnnnnnnnnnnnnnnnnnnnnnnnnnnnnnnnnnnnnnnnnnnnnnnnnnnnnnnnnnnnnnnnnnnnnnnnnnnnnnnnnnnnnnnnnnnnnnnnnnnnnnnnnnnnnnnnnnnnnnnnnnnnnnnnnnnnnnnnnnnnnnnnnnnnnnnnnnnnnnnnnnnnnnnnnnnnnnnnnnnnnnnnnnnnnnnnnnnnnnnnnnnnnnnnnnnnnnnnnnnnnnnnnnnnnnnnnnnnnnnnnnnnnnnnnnnnnnnnnnnnnnnnnnnnnnnnnnnnnnnnnnnnnnnnnnnnnnnnnnnnnnnnnnnnnnnnnnnnnnnnnnnnnnnnnnnnnnnnnnnnnnnnnnnnnnnnnnnnnnnnnnnnnnnnnnnnnnnnnnnnnnnnnnnnnnnnnnnnnnnnnnnnnnnnnnnnnnnnnnnnnnnnnnnnnnnnnnnnnnnnnnnnnnnnnnnnnnnnnnnnnnnnnnnnnnnnnnnnnnnnnnnnnnnnnnnnnnnnnnnnnnnnnnnnnnnnnnnnnnnnnnnnnnnnnnnnnnnnnnnnnnnnnnnnnnnnnnnnnnnnnnnnnnnnnnnnnnnnnnnnnnnnnnnnnnnnnnnnnnnnnnnnnnnnnnnnnnnnnnnnnnnnnnnnnnnnnnnnnnnnnnnnnnnnnnnnnnnnnnnnnnnnnnnnnnnnnnnnnnnnnnnnnnnnnnnnnnnnnnnnnnnnnnnnnnnnnnnnnnnnnnnnnnnnnnnnnnnnnnnnnnnnnnnnnnnnnnnnnnnnnnnnnnnnnnnnnnnnnnnnnnnnnnnnnnnnnnnnnnnnnnnnnnnnnnnnnnnnnnnnnnnnnnnnnnnnnnnnnnnnnnnnnnnnnnnnnnnnnnnnnnnnnnnnnnnnnnnnnnnnnnnnnnnnnnnnnnnnnnnnnnnnnnnnnnnnnnnnnnnnnnnnnnnnnnnnnnnnnnnnnnnnnnnnnnnnnnnnnnnnnnnnnnnnnnnnnnnnnnnnnnnnnnnnnnnnnnnnnnnnnnnnnnnnnnnnnnnnnnnnnnnnnnnnnnnnnnnnnnnnnnnnnnnnnnnnnnnnnnnnnnnnnnnnnnnnnnnnnnnnnnnnnnnnnnnnnnnnnnnnnnnnnnnnnnnnnnnnnnnnnnnnnnnnnnnnnnnnnnnnnnnnnnnnnnnnnnnnnnnnnnnnnnnnnnnnnnnnnnnnnnnnnnnnnnnnnnnnnnnnnnnnnnnnnnnnnnnnnnnnnnnnnnnnnnnnnnnnnnnnnnnnnnnnnnnnnnnnnnnnnnnnnnnnnnnnnnnnnnnnnnnnnnnnnnnnnnnnnnnnnnnnnnnnnnnnnnnnnnnnnnnnnnnnnnnnnnnnnnnnnnnnnnnnnnnnnnnnnnnnnnnnnnnnnnnnnnnnnnnnnnnnnnnnnnnnnnnnnnnnnnnnnnnnnnnnnnnnnnnnnnnnnnnnnnnnnnnnnnnnnnnnnnnnnnnnnnnnnnnnnnnnnnnnnnnnnnnnnnnnnnnnnnnnnnnnnnnnnnnnnnnnnnnnnnnnnnnnnnnnnnnnnnnnnnnnnnnnnnnnnnnnnnnnnnnnnnnnnnnnnnnnnnnnnnnnnnnnnnnnnnnnnnnnnnnnnnnnnnnnnnnnnnnnnnnnnnnnnnnnnnnnnnnnnnnnnnnnnnnnnnnnnnnnnnnnnnnnnnnnnnnnnnnnnnnnnnnnnnnnnnnnnnnnnnnnnnnnnnnnnnnnnnnnnnnnnnnnnnnnnnnnnnnnnnnnnnnnnnnnnnnnnnnnnnnnnnnnnnnnnnnnnnnnnnnnnnnnnnnnnnnnnnnnnnnnnnnnnnnnnnnnnnnnnnnnnnnnnnnnnnnnnnnnnnnnnnnnnnnnnnnnnnnnnnnnnnnnnnnnnnnnnnnnnnnnnnnnnnnnnnnnnnnnnnnnnnnnnnnnnnnnnnnnnnnnnnnnnnnnnnnnnnnnnnnnnnnnnnnnnnnnnnnnnnnnnnnnnnnnnnnnnnnnnnnnnnnnnnnnnnnnnnnnnnnnnnnnnnnnnnnnnnnnnnnnnnnnnnnnnnnnnnnnnnnnnnnnnnnnnnnnnnnnnnnnnnnnnnnnnnnnnnnnnnnnnnnnnnnnnnnnnnnnnnnnnnnnnnnnnnnnnnnnnnnnnnnnnnnnnnnnnnnnnnnnnnnnnnnnnnnnnnnnnnnnnnnnnnnnnnnnnnnnnnnnnnnnnnnnnnnnnnnnnnnnnnnnnnnnnnnnnnnnnnnnnnnnnnnnnnnnnnnnnnnnnnnnnnnnnnnnnnnnnnnnnnnnnnnnnnnnnnnnnnnnnnnnnnnnnnnnnnnnnnnnnnnnnnnnnnnnnnnnnnnnnnnnnnnnnnnnnnnnnnnnnnnnnnnnnnnnnnnnnnnnnnnnnnnnnnnnnnnnnnnnnnnnnnnnnnnnnnnnnnnnnnnnnnnnnnnnnnnnnnnnnnnnnnnnnnnnnnnnnnnnnnnnnnnnnnnnnnnnnnnnnnnnnnnnnnnnnnnnnnnnnnnnnnnnnnnnnnnnnnnnnnnnnnnnnnnnnnnnnnnnnnnnnnnnnnnnnnnnnnnnnnnnnnnnnnnnnnnnnnnnnnnnnnnnnnnnnnnnnnnnnnnnnnnnnnnnnnnnnnnnnnnnnnnnnnnnnnnnnnnnnnnnnnnnnnnnnnnnnnnnnnnnnnnnnnnnnnnnnnnnnnnnnnnnnnnnnnnnnnnnnnnnnnnnnnnnnnnnnnnnnnnnnnnnnnnnnnnnnnnnnnnnnnnnnnnnnnnnnnnnnnnnnnnnnnnnnnnnnnnnnnnnnnnnnnnnnnnnnnnnnnnnnnnnnnnnnnnnnnnnnnnnnnnnnnnnnnnnnnnnnnnnnnnnnnnnnnnnnnnnnnnnnnnnnnnnnnnnnnnnnnnnnnnnnnnnnnnnnnnnnnnnnnnnnnnnnnnnnnnnnnnnnnnnnnnnnnnnnnnnnnnnnnnnnnnnnnnnnnnnnnnnnnnnnnnnnnnnnnnnnnnnnnnnnnnnnnnnnnnnnnnnnnnnnnnnnnnnnnnnnnnnnnnnnnnnnnnnnnnnnnnnnnnnnnnnnnnnnnnnnnnnnnnnnnnnnnnnnnnnnnnnnnnnnnnnnnnnnnnnnnnnnnnnnnnnnnnnnnnnnnnnnnnnnnnnnnnnnnnnnnnnnnnnnnnnnnnnnnnnnnnnnnnnnnnnnnnnnnnnnnnnnnnnnnnnnnnnnnnnnnnnnnnnnnnnnnnnnnnnnnnnnnnnnnnnnnnnnnnnnnnnnnnnnnnnnnnnnnnnnnnnnnnnnnnnnnnnnnnnnnnnnnnnnnnnnnnnnnnnnnnnnnnnnnnnnnnnnnnnnnnnnnnnnnnnnnnnnnnnnnnnnnnnnnnnnnnnnnnnnnnnnnnnnnnnnnnnnnnnnnnnnnnnnnnnnnnnnnnnnnnnnnnnnnnnnnnnnnnnnnnnnnnnnnnnnnnnnnnnnnnnnnnnnnnnnnnnnnnnnnnnnnnnnnnnnnnnnnnnnnnnnnnnnnnnnnnnnnnnnnnnnnnnnnnnnnnnnnnnnnnnnnnnnnnnnnnnnnnnnnnnnnnnnnnnnnnnnnnnnnnnnnnnnnnnnnnnnnnnnnnnnnnnnnnnnnnnnnnnnnnnnnnnnnnnnnnnnnnnnnnnnnnnnnnnnnnnnnnnnnnnnnnnnnnnnnnnnnnnnnnnnnnnnnnnnnnnnnnnnnnnnnnnnnnnnnnnnnnnnnnnnnnnnnnnnnnnnnnnnnnnnnnnnnnnnnnnnnnnnnnnnnnnnnnnnnnnnnnnnnnnnnnnnnnnnnnnnnnnnnnnnnnnnnnnnnnnnnnnnnnnnnnnnnnnnnnnnnnnnnnnnnnnnnnnnnnnnnnnnnnnnnnnnnnnnnnnnnnnnnnnnnnnnnnnnnnnnnnnnnnnnnnnnnnnnnnnnnnnnnnnnnnnnnnnnnnnnnnnnnnnnnnnnnnnnnnnnnnnnnnnnnnnnnnnnnnnnnnnnnnnnnnnnnnnnnnnnnnnnnnnnnnnnnnnnnnnnnnnnnnnnnnnnnnnnnnnnnnnnnnnnnnnnnnnnnnnnnnnnnnnnnnnnnnnnnnnnnnnnnnnnnnnnnnnnnnnnnnnnnnnnnnnnnnnnnnnnnnnnnnnnnnnnnnnnnnnnnnnnnnnnnnnnnnnnnnnnnnnnnnnnnnnnnnnnnnnnnnnnnnnnnnnnnnnnnnnnnnnnnnnnnnnnnnnnnnnnnnnnnnnnnnnnnnnnnnnnnnnnnnnnnnnnnnnnnnnnnnnnnnnnnnnnnnnnnnnnnnnnnnnnnnnnnnnnnnnnnnnnnnnnnnnnnnnnnnnnnnnnnnnnnnnnnnnnnnnnnnnnnnnnnnnnnnnnnnnnnnnnnnnnnnnnnnnnnnnnnnnnnnnnnnnnnnnnnnnnnnnnnnnnnnnnnnnnnnnnnnnnnnnnnnnnnnnnnnnnnnnnnnnnnnnnnnnnnnnnnnnnnnnnnnnnnnnnnnnnnnnnnnnnnnnnnnnnnnnnnnnnnnnnnnnnnnnnnnnnnnnnnnnnnnnnnnnnnnnnnnnnnnnnnnnnnnnnnnnnnnnnnnnnnnnnnnnnnnnnnnnnnnnnnnnnnnnnnnnnnnnnnnnnnnnnnnnnnnnnnnnnnnnnnnnnnnnnnnnnnnnnnnnnnnnnnnnnnnnnnnnnnnnnnnnnnnnnnnnnnnnnnnnnnnnnnnnnnnnnnnnnnnnnnnnnnnnnnnnnnnnnnnnnnnnnnnnnnnnnnnnnnnnnnnnnnnnnnnnnnnnnnnnnnnnnnnnnnnnnnnnnnnnnnnnnnnnnnnnnnnnnnnnnnnnnnnnnnnnnnnnnnnnnnnnnnnnnnnnnnnnnnnnnnnnnnnnnnnnnnnnnnnnnnnnnnnnnnnnnnnnnnnnnnnnnnnnnnnnnnnnnnnnnnnnnnnnnnnnnnnnnnnnnnnnnnnnnnnnnnnnnnnnnnnnnnnnnnnnnnnnnnnnnnnnnnnnnnnnnnnnnnnnnnnnnnnnnnnnnnnnnnnnnnnnnnnnnnnnnnnnnnnnnnnnnnnnnnnnnnnnnnnnnnnnnnnnnnnnnnnnnnnnnnnnnnnnnnnnnnnnnnnnnnnnnnnnnnnnnnnnnnnnnnnnnnnnnnnnnnnnnnnnnnnnnnnnnnnnnnnnnnnnnnnnnnnnnnnnnnnnnnnnnnnnnnnnnnnnnnnnnnnnnnnnnnnnnnnnnnnnnnnnnnnnnnnnnnnnnnnnnnnnnnnnnnnnnnnnnnnnnnnnnnnnnnnnnnnnnnnnnnnnnnnnnnnnnnnnnnnnnnnnnnnnnnnnnnnnnnnnnnnnnnnnnnnnnnnnnnnnnnnnnnnnnnnnnnnnnnnnnnnnnnnnnnnnnnnnnnnnnnnnnnnnnnnnnnnnnnnnnnnnnnnnnnnnnnnnnnnnnnnnnnnnnnnnnnnnnnnnnnnnnnnnnnnnnnnnnnnnnnnnnnnnnnnnnnnnnnnnnnnnnnnnnnnnnnnnnnnnnnnnnnnnnnnnnnnnnnnnnnnnnnnnnnnnnnnnnnnnnnnnnnnnnnnnnnnnnnnnnnnnnnnnnnnnnnnnnnnnnnnnnnnnnnnnnnnnnnnnnnnnnnnnnnnnnnnnnnnnnnnnnnnnnnnnnnnnnnnnnnnnnnnnnnnnnnnnnnnnnnnnnnnnnnnnnnnnnnnnnnnnnnnnnnnnnnnnnnnnnnnnnnnnnnnnnnnnnnnnnnnnnnnnnnnnnnnnnnnnnnnnnnnnnnnnnnnnnnnnnnnnnnnnnnnnnnnnnnnnnnnnnnnnnnnnnnnnnnnnnnnnnnnnnnnnnnnnnnnnnnnnnnnnnnnnnnnnnnnnnnnnnnnnnnnnnnnnnnnnnnnnnnnnnnnnnnnnnnnnnnnnnnnnnnnnnnnnnnnnnnnnnnnnnnnnnnnnnnnnnnnnnnnnnnnnnnnnnnnnnnnnnnnnnnnnnnnnnnnnnnnnnnnnnnnnnnnnnnnnnnnnnnnnnnnnnnnnnnnnnnnnnnnnnnnnnnnnnnnnnnnnnnnnnnnnnnnnnnnnnnnnnnnnnnnnnnnnnnnnnnnnnnnnnnnnnnnnnnnnnnnnnnnnnnnnnnnnnnnnnnnnnnnnnnnnnnnnnnnnnnnnnnnnnnnnnnnnnnnnnnnnnnnnnnnnnnnnnnnnnnnnnnnnnnnnnnnnnnnnnnnnnnnnnnnnnnnnnnnnnnnnnnnnnnnnnnnnnnnnnnnnnnnnnnnnnnnnnnnnnnnnnnnnnnnnnnnnnnnnnnnnnnnnnnnnnnnnnnnnnnnnnnnnnnnnnnnnnnnnnnnnnnnnnnnnnnnnnnnnnnnnnnnnnnnnnnnnnnnnnnnnnnnnnnnnnnnnnnnnnnnnnnnnnnnnnnnnnnnnnnnnnnnnnnnnnnnnnnnnnnnnnnnnnnnnnnnnnnnnnnnnnnnnnnnnnnnnnnnnnnnnnnnnnnnnnnnnnnnnnnnnnnnnnnnnnnnnnnnnnnnnnnnnnnnnnnnnnnnnnnnnnnnnnnnnnnnnnnnnnnnnnnnnnnnnnnnnnnnnnnnnnnnnnnnnnnnnnnnnnnnnnnnnnnnnnnnnnnnnnnnnnnnnnnnnnnnnnnnnnnnnnnnnnnnnnnnnnnnnnnnnnnnnnnnnnnnnnnnnnnnnnnnnnnnnnnnnnnnnnnnnnnnnnnnnnnnnnnnnnnnnnnnnnnnnnnnnnnnnnnnnnnnnnnnnnnnnnnnnnnnnnnnnnnnnnnnnnnnnnnnnnnnnnnnnnnnnnnnnnnnnnnnnnnnnnnnnnnnnnnnnnnnnnnnnnnnnnnnnnnnnnnnnnnnnnnnnnnnnnnnnnnnnnnnnnnnnnnnnnnnnnnnnnnnnnnnnnnnnnnnnnnnnnnnnnnnnnnnnnnnnnnnnnnnnnnnnnnnnnnnnnnnnnnnnnnnnnnnnnnnnnnnnnnnnnnnnnnnnnnnnnnnnnnnnnnnnnnnnnnnnnnnnnnnnnnnnnnnnnnnnnnnnnnnnnnnnnnnnnnnnnnnnnnnnnnnnnnnnnnnnnnnnnnnnnnnnnnnnnnnnnnnnnnnnnnnnnnnnnnnnnnnnnnnnnnnnnnnnnnnnnnnnnnnnnnnnnnnnnnnnnnnnnnnnnnnnnnnnnnnnnnnnnnnnnnnnnnnnnnnnnnnnnnnnnnnnnnnnnnnnnnnnnnnnnnnnnnnnnnnnnnnnnnnnnnnnnnnnnnnnnnnnnnnnnnnnnnnnnnnnnnnnnnnnnnnnnnnnnnnnnnnnnnnnnnnnnnnnnnnnnnnnnnnnnnnnnnnnnnnnnnnnnnnnnnnnnnnnnnnnnnnnnnnnnnnnnnnnnnnnnnnnnnnnnnnnnnnnnnnnnnnnnnnnnnnnnnnnnnnnnnnnnnnnnnnnnnnnnnnnnnnnnnnnnnnnnnnnnnnnnnnnnnnnnnnnnnnnnnnnnnnnnnnnnnnnnnnnnnnnnnnnnnnnnnnnnnnnnnnnnnnnnnnnnnnnnnnnnnnnnnnnnnnnnnnnnnnnnnnnnnnnnnnnnnnnnnnnnnnnnnnnnnnnnnnnnnnnnnnnnnnnnnnnnnnnnnnnnnnnnnnnnnnnnnnnnnnnnnnnnnnnnnnnnnnnnnnnnnnnnnnnnnnnnnnnnnnnnnnnnnnnnnnnnnnnnnnnnnnnnnnnnnnnnnnnnnnnnnnnnnnnnnnnnnnnnnnnnnnnnnnnnnnnnnnnnnnnnnnnnnnnnnnnnnnnnnnnnnnnnnnnnnnnnnnnnnnnnnnnnnnnnnnnnnnnnnnnnnnnnnnnnnnnnnnnnnnnnnnnnnnnnnnnnnnnnnnnnnnnnnnnnnnnnnnnnnnnnnnnnnnnnnnnnnnnnnnnnnnnnnnnnnnnnnnnnnnnnnnnnnnnnnnnnnnnnnnnnnnnnnnnnnnnnnnnnnnnnnnnnnnnnnnnnnnnnnnnnnnnnnnnnnnnnnnnnnnnnnnnnnnnnnnnnnnnnnnnnnnnnnnnnnnnnnnnnnnnnnnnnnnnnnnnnnnnnnnnnnnnnnnnnnnnnnnnnnnnnnnnnnnnnnnnnnnnnnnnnnnnnnnnnnnnnnnnnnnnnnnnnnnnnnnnnnnnnnnnnnnnnnnnnnnnnnnnnnnnnnnnnnnnnnnnnnnnnnnnnnnnnnnnnnnnnnnnnnnnnnnnnnnnnnnnnnnnnnnnnnnnnnnnnnnnnnnnnnnnnnnnnnnnnnnnnnnnnnnnnnnnnnnnnnnnnnnnnnnnnnnnnnnnnnnnnnnnnnnnnnnnnnnnnnnnnnnnnnnnnnnnnnnnnnnnnnnnnnnnnnnnnnnnnnnnnnnnnnnnnnnnnnnnnnnnnnnnnnnnnnnnnnnnnnnnnnnnnnnnnnnnnnnnnnnnnnnnnnnnnnnnnnnnnnnnnnnnnnnnnnnnnnnnnnnnnnnnnnnnnnnnnnnnnnnnnnnnnnnnnnnnnnnnnnnnnnnnnnnnnnnnnnnnnnnnnnnnnnnnnnnnnnnnnnnnnnnnnnnnnnnnnnnnnnnnnnnnnnnnnnnnnnnnnnnnnnnnnnnnnnnnnnnnnnnnnnnnnnnnnnnnnnnnnnnnnnnnnnnnnnnnnnnnnnnnnnnnnnnnnnnnnnnnnnnnnnnnnnnnnnnnnnnnnnnnnnnnnnnnnnnnnnnnnnnnnnnnnnnnnnnnnnnnnnnnnnnnnnnnnnnnnnnnnnnnnnnnnnnnnnnnnnnnnnnnnnnnnnnnnnnnnnnnnnnnnnnnnnnnnnnnnnnnnnnnnnnnnnnnnnnnnnnnnnnnnnnnnnnnnnnnnnnnnnnnnnnnnnnnnnnnnnnnnnnnnnnnnnnnnnnnnnnnnnnnnnnnnnnnnnnnnnnnnnnnnnnnnnnnnnnnnnnnnnnnnnnnnnnnnnnnnnnnnnnnnnnnnnnnnnnnnnnnnnnnnnnnnnnnnnnnnnnnnnnnnnnnnnnnnnnnnnnnnnnnnnnnnnnnnnnnnnnnnnnnnnnnnnnnnnnnnnnnnnnnnnnnnnnnnnnnnnnnnnnnnnnnnnnnnnnnnnnnnnnnnnnnnnnnnnnnnnnnnnnnnnnnnnnnnnnnnnnnnnnnnnnnnnnnnnnnnnnnnnnnnnnnnnnnnnnnnnnnnnnnnnnnnnnnnnnnnnnnnnnnnnnnnnnnnnnnnnnnnnnnnnnnnnnnnnnnnnnnnnnnnnnnnnnnnnnnnnnnnnnnnnnnnnnnnnnnnnnnnnnnnnnnnnnnnnnnnnnnnnnnnnnnnnnnnnnnnnnnnnnnnnnnnnnnnnnnnnnnnnnnnnnnnnnnnnnnnnnnnnnnnnnnnnnnnnnnnnnnnnnnnnnnnnnnnnnnnnnnnnnnnnnnnnnnnnnnnnnnnnnnnnnnnnnnnnnnnnnnnnnnnnnnnnnnnnnnnnnnnnnnnnnnnnnnnnnnnnnnnnnnnnnnnnnnnnnnnnnnnnnnnnnnnnnnnnnnnnnnnnnnnnnnnnnnnnnnnnnnnnnnnnnnnnnnnnnnnnnnnnnnnnnnnnnnnnnnnnnnnnnnnnnnnnnnnnnnnnnnnnnnnnnnnnnnnnnnnnnnnnnnnnnnnnnnnnnnnnnnnnnnnnnnnnnnnnnnnnnnnnnnnnnnnnnnnnnnnnnnnnnnnnnnnnnnnnnnnnnnnnnnnnnnnnnnnnnnnnnnnnnnnnnnnnnnnnnnnnnnnnnnnnnnnnnnnnnnnnnnnnnnnnnnnnnnnnnnnnnnnnnnnnnnnnnnnnnnnnnnnnnnnnnnnnnnnnnnnnnnnnnnnnnnnnnnnnnnnnnnnnnnnnnnnnnnnnnnnnnnnnnnnnnnnnnnnnnnnnnnnnnnnnnnnnnnnnnnnnnnnnnnnnnnnnnnnnnnnnnnnnnnnnnnnnnnnnnnnnnnnnnnnnnnnnnnnnnnnnnnnnnnnnnnnnnnnnnnnnnnnnnnnnnnnnnnnnnnnnnnnnnnnnnnnnnnnnnnnnnnnnnnnnnnnnnnnnnnnnnnnnnnnnnnnnnnnnnnnnnnnnnnnnnnnnnnnnnnnnnnnnnnnnnnnnnnnnnnnnnnnnnnnnnnnnnnnnnnnnnnnnnnnnnnnnnnnnnnnnnnnnnnnnnnnnnnnnnnnnnnnnnnnnnnnnnnnnnnnnnnnnnnnnnnnnnnnnnnnnnnnnnnnnnnnnnnnnnnnnnnnnnnnnnnnnnnnnnnnnnnnnnnnnnnnnnnnnnnnnnnnnnnnnnnnnnnnnnnnnnnnnnnnnnnnnnnnnnnnnnnnnnnnnnnnnnnnnnnnnnnnnnnnnnnnnnnnnnnnnnnnnnnnnnnnnnnnnnnnnnnnnnnnnnnnnnnnnnnnnnnnnnnnnnnnnnnnnnnnnnnnnnnnnnnnnnnnnnnnnnnnnnnnnnnnnnnnnnnnnnnnnnnnnnnnnnnnnnnnnnnnnnnnnnnnnnnnnnnnnnnnnnnnnnnnnnnnnnnnnnnnnnnnnnnnnnnnnnnnnnnnnnnnnnnnnnnnnnnnnnnnnnnnnnnnnnnnnnnnnnnnnnnnnnnnnnnnnnnnnnnnnnnnnnnnnnnnnnnnnnnnnnnnnnnnnnnnnnnnnnnnnnnnnnnnnnnnnnnnnnnnnnnnnnnnnnnnnnnnnnnnnnnnnnnnnnnnnnnnnnnnnnnnnnnnnnnnnnnnnnnnnnnnnnnnnnnnnnnnnnnnnnnnnnnnnnnnnnnnnnnnnnnnnnnnnnnnnnnnnnnnnnnnnnnnnnnnnnnnnnnnnnnnnnnnnnnnnnnnnnnnnnnnnnnnnnnnnnnnnnnnnnnnnnnnnnnnnnnnnnnnnnnnnnnnnnnnnnnnnnnnnnnnnnnnnnnnnnnnnnnnnnnnnnnnnnnnnnnnnnnnnnnnnnnnnnnnnnnnnnnnnnnnnnnnnnnnnnnnnnnnnnnnnnnnnnnnnnnnnnnnnnnnnnnnnnnnnnnnnnnnnnnnnnnnnnnnnnnnnnnnnnnnnnnnnnnnnnnnnnnnnnnnnnnnnnnnnnnnnnnnnnnnnnnnnnnnnnnnnnnnnnnnnnnnnnnnnnnnnnnnnnnnnnnnnnnnnnnnnnnnnnnnnnnnnnnnnnnnnnnnnnnnnnnnnnnnnnnnnnnnnnnnnnnnnnnnnnnnnnnnnnnnnnnnnnnnnnnnnnnnnnnnnnnnnnnnnnnnnnnnnnnnnnnnnnnnnnnnnnnnnnnnnnnnnnnnnnnnnnnnnnnnnnnnnnnnnnnnnnnnnnnnnnnnnnnnnnnnnnnnnnnnnnnnnnnnnnnnnnnnnnnnnnnnnnnnnnnnnnnnnnnnnnnnnnnnnnnnnnnnnnnnnnnnnnnnnnnnnnnnnnnnnnnnnnnnnnnnnnnnnnnnnnnnnnnnnnnnnnnnnnnnnnnnnnnnnnnnnnnnnnnnnnnnnnnnnnnnnnnnnnnnnnnnnnnnnnnnnnnnnnnnnnnnnnnnnnnnnnnnnnnnnnnnnnnnnnnnnnnnnnnnnnnnnnnnnnnnnnnnnnnnnnnnnnnnnnnnnnnnnnnnnnnnnnnnnnnnnnnnnnnnnnnnnnnnnnnnnnnnnnnnnnnnnnnnnnnnnnnnnnnnnnnnnnnnnnnnnnnnnnnnnnnnnnnnnnnnnnnnnnnnnnnnnnnnnnnnnnnnnnnnnnnnnnnnnnnnnnnnnnnnnnnnnnnnnnnnnnnnnnnnnnnnnnnnnnnnnnnnnnnnnnnnnnnnnnnnnnnnnnnnnnnnnnnnnnnnnnnnnnnnnnnnnnnnnnnnnnnnnnnnnnnnnnnnnnnnnnnnnnnnnnnnnnnnnnnnnnnnnnnnnnnnnnnnnnnnnnnnnnnnnnnnnnnnnnnnnnnnnnnnnnnnnnnnnnnnnnnnnnnnnnnnnnnnnnnnnnnnnnnnnnnnnnnnnnnnnnnnnnnnnnnnnnnnnnnnnnnnnnnnnnnnnnnnnnnnnnnnnnnnnnnnnnnnnnnnnnnnnnnnnnnnnnnnnnnnnnnnnnnnnnnnnnnnnnnnnnnnnnnnnnnnnnnnnnnnnnnnnnnnnnnnnnnnnnnnnnnnnnnnnnnnnnnnnnnnnnnnnnnnnnnnnnnnnnnnnnnnnnnnnnnnnnnnnnnnnnnnnnnnnnnnnnnnnnnnnnnnnnnnnnnnnnnnnnnnnnnnnnnnnnnnnnnnnnnnnnnnnnnnnnnnnnnnnnnnnnnnnnnnnnnnnnnnnnnnnnnnnnnnnnnnnnnnnnnnnnnnnnnnnnnnnnnnnnnnnnnnnnnnnnnnnnnnnnnnnnnnnnnnnnnnnnnnnnnnnnnnnnnnnnnnnnnnnnnnnnnnnnnnnnnnnnnnnnnnnnnnnnnnnnnnnnnnnnnnnnnnnnnnnnnnnnnnnnnnnnnnnnnnnnnnnnnnnnnnnnnnnnnnnnnnnnnnnnnnnnnnnnnnnnnnnnnnnnnnnnnnnnnnnnnnnnnnnnnnnnnnnnnnnnnnnnnnnnnnnnnnnnnnnnnnnnnnnnnnnnnnnnnnnnnnnnnnnnnnnnnnnnnnnnnnnnnnnnnnnnnnnnnnnnnnnnnnnnnnnnnnnnnnnnnnnnnnnnnnnnnnnnnnnnnnnnnnnnnnnnnnnnnnnnnnnnnnnnnnnnnnnnnnnnnnnnnnnnnnnnnnnnnnnnnnnnnnnnnnnnnnnnnnnnnnnnnnnnnnnnnnnnnnnnnnnnnnnnnnnnnnnnnnnnnnnnnnnnnnnnnnnnnnnnnnnnnnnnnnnnnnnnnnnnnnnnnnnnnnnnnnnnnnnnnnnnnnnnnnnnnnnnnnnnnnnnnnnnnnnnnnnnnnnnnnnnnnnnnnnnnnnnnnnnnnnnnnnnnnnnnnnnnnnnnnnnnnnnnnnnnnnnnnnnnnnnnnnnnnnnnnnnnnnnnnnnnnnnnnnnnnnnnnnnnnnnnnnnnnnnnnnnnnnnnnnnnnnnnnnnnnnnnnnnnnnnnnnnnnnnnnnnnnnnnnnnnnnnnnnnnnnnnnnnnnnnnnnnnnnnnnnnnnnnnnnnnnnnnnnnnnnnnnnnnnnnnnnnnnnnnnnnnnnnnnnnnnnnnnnnnnnnnnnnnnnnnnnnnnnnnnnnnnnnnnnnnnnnnnnnnnnnnnnnnnnnnnnnnnnnnnnnnnnnnnnnnnnnnnnnnnnnnnnnnnnnnnnnnnnnnnnnnnnnnnnnnnnnnnnnnnnnnnnnnnnnnnnnnnnnnnnnnnnnnnnnnnnnnnnnnnnnnnnnnnnnnnnnnnnnnnnnnnnnnnnnnnnnnnnnnnnnnnnnnnnnnnnnnnnnnnnnnnnnnnnnnnnnnnnnnnnnnnnnnnnnnnnnnnnnnnnnnnnnnnnnnnnnnnnnnnnnnnnnnnnnnnnnnnnnnnnnnnnnnnnnnnnnnnnnnnnnnnnnnnnnnnnnnnnnnnnnnnnnnnnnnnnnnnnnnnnnnnnnnnnnnnnnnnnnnnnnnnnnnnnnnnnnnnnnnnnnnnnnnnnnnnnnnnnnnnnnnnnnnnnnnnnnnnnnnnnnnnnnnnnnnnnnnnnnnnnnnnnnnnnnnnnnnnnnnnnnnnnnnnnnnnnnnnnnnnnnnnnnnnnnnnnnnnnnnnnnnnnnnnnnnnnnnnnnnnnnnnnnnnnnnnnnnnnnnnnnnnnnnnnnnnnnnnnnnnnnnnnnnnnnnnnnnnnnnnnnnnnnnnnnnnnnnnnnnnnnnnnnnnnnnnnnnnnnnnnnnnnnnnnnnnnnnnnnnnnnnnnnnnnnnnnnnnnnnnnnnnnnnnnnnnnnnnnnnnnnnnnnnnnnnnnnnnnnnnnnnnnnnnnnnnnnnnnnnnnnnnnnnnnnnnnnnnnnnnnnnnnnnnnnnnnnnnnnnnnnnnnnnnnnnnnnnnnnnnnnnnnnnnnnnnnnnnnnnnnnnnnnnnnnnnnnnnnnnnnnnnnnnnnnnnnnnnnnnnnnnnnnnnnnnnnnnnnnnnnnnnnnnnnnnnnnnnnnnnnnnnnnnnnnnnnnnnnnnnnnnnnnnnnnnnnnnnnnnnnnnnnnnnnnnnnnnnnnnnnnnnnnnnnnnnnnnnnnnnnnnnnnnnnnnnnnnnnnnnnnnnnnnnnnnnnnnnnnnnnnnnnnnnnnnnnnnnnnnnnnnnnnnnnnnnnnnnnnnnnnnnnnnnnnnnnnnnnnnnnnnnnnnnnnnnnnnnnnnnnnnnnnnnnnnnnnnnnnnnnnnnnnnnnnnnnnnnnnnnnnnnnnnnnnnnnnnnnnnnnnnnnnnnnnnnnnnnnnnnnnnnnnnnnnnnnnnnnnnnnnnnnnnnnnnnnnnnnnnnnnnnnnnnnnnnnnnnnnnnnnnnnnnnnnnnnnnnnnnnnnnnnnnnnnnnnnnnnnnnnnnnnnnnnnnnnnnnnnnnnnnnnnnnnnnnnnnnnnnnnnnnnnnnnnnnnnnnnnnnnnnnnnnnnnnnnnnnnnnnnnnnnnnnnnnnnnnnnnnnnnnnnnnnnnnnnnnnnnnnnnnnnnnnnnnnnnnnnnnnnnnnnnnnnnnnnnnnnnnnnnnnnnnnnnnnnnnnnnnnnnnnnnnnnnnnnnnnnnnnnnnnnnnnnnnnnnnnnnnnnnnnnnnnnnnnnnnnnnnnnnnnnnnnnnnnnnnnnnnnnnnnnnnnnnnnnnnnnnnnnnnnnnnnnnnnnnnnnnnnnnnnnnnnnnnnnnnnnnnnnnnnnnnnnnnnnnnnnnnnnnnnnnnnnnnnnnnnnnnnnnnnnnnnnnnnnnnnnnnnnnnnnnnnnnnnnnnnnnnnnnnnnnnnnnnnnnnnnnnnnnnnnnnnnnnnnnnnnnnnnnnnnnnnnnnnnnnnnnnnnnnnnnnnnnnnnnnnnnnnnnnnnnnnnnnnnnnnnnnnnnnnnnnnnnnnnnnnnnnnnnnnnnnnnnnnnnnnnnnnnnnnnnnnnnnnnnnnnnnnnnnnnnnnnnnnnnnnnnnnnnnnnnnnnnnnnnnnnnnnnnnnnnnnnnnnnnnnnnnnnnnnnnnnnnnnnnnnnnnnnnnnnnnnnnnnnnnnnnnnnnnnnnnnnnnnnnnnnnnnnnnnnnnnnnnnnnnnnnnnnnnnnnnnnnnnnnnnnnnnnnnnnnnnnnnnnnnnnnnnnnnnnnnnnnnnnnnnnnnnnnnnnnnnnnnnnnnnnnnnnnnnnnnnnnnnnnnnnnnnnnnnnnnnnnnnnnnnnnnnnnnnnnnnnnnnnnnnnnnnnnnnnnnnnnnnnnnnnnnnnnnnnnnnnnnnnnnnnnnnnnnnnnnnnnnnnnnnnnnnnnnnnnnnnnnnnnnnnnnnnnnnnnnnnnnnnnnnnnnnnnnnnnnnnnnnnnnnnnnnnnnnnnnnnnnnnnnnnnnnnnnnnnnnnnnnnnnnnnnnnnnnnnnnnnnnnnnnnnnnnnnnnnnnnnnnnnnnnnnnnnnnnnnnnnnnnnnnnnnnnnnnnnnnnnnnnnnnnnnnnnnnnnnnnnnnnnnnnnnnnnnnnnnnnnnnnnnnnnnnnnnnnnnnnnnnnnnnnnnnnnnnnnnnnnnnnnnnnnnnnnnnnnnnnnnnnnnnnnnnnnnnnnnnnnnnnnnnnnnnnnnnnnnnnnnnnnnnnnnnnnnnnnnnnnnnnnnnnnnnnnnnnnnnnnnnnnnnnnnnnnnnnnnnnnnnnnnnnnnnnnnnnnnnnnnnnnnnnnnnnnnnnnnnnnnnnnnnnnnnnnnnnnnnnnnnnnnnnnnnnnnnnnnnnnnnnnnnnnnnnnnnnnnnnnnnnnnnnnnnnnnnnnnnnnnnnnnnnnnnnnnnnnnnnnnnnnnnnnnnnnnnnnnnnnnnnnnnnnnnnnnnnnnnnnnnnnnnnnnnnnnnnnnnnnnnnnnnnnnnnnnnnnnnnnnnnnnnnnnnnnnnnnnnnnnnnnnnnnnnnnnnnnnnnnnnnnnnnnnnnnnnnnnnnnnnnnnnnnnnnnnnnnnnnnnnnnnnnnnnnnnnnnnnnnnnnnnnnnnnnnnnnnnnnnnnnnnnnnnnnnnnnnnnnnnnnnnnnnnnnnnnnnnnnnnnnnnnnnnnnnnnnnnnnnnnnnnnnnnnnnnnnnnnnnnnnnnnnnnnnnnnnnnnnnnnnnnnnnnnnnnnnnnnnnnnnnnnnnnnnnnnnnnnnnnnnnnnnnnnnnnnnnnnnnnnnnnnnnnnnnnnnnnnnnnnnnnnnnnnnnnnnnnnnnnnnnnnnnnnnnnnnnnnnnnnnnnnnnnnnnnnnnnnnnnnnnnnnnnnnnnnnnnnnnnnnnnnnnnnnnnnnnnnnnnnnnnnnnnnnnnnnnnnnnnnnnnnnnnnnnnnnnnnnnnnnnnnnnnnnnnnnnnnnnnnnnnnnnnnnnnnnnnnnnnnnnnnnnnnnnnnnnnnnnnnnnnnnnnnnnnnnnnnnnnnnnnnnnnnnnnnnnnnnnnnnnnnnnnnnnnnnnnnnnnnnnnnnnnnnnnnnnnnnnnnnnnnnnnnnnnnnnnnnnnnnnnnnnnnnnnnnnnnnnnnnnnnnnnnnnnnnnnnnnnnnnnnnnnnnnnnnnnnnnnnnnnnnnnnnnnnnnnnnnnnnnnnnnnnnnnnnnnnnnnnnnnnnnnnnnnnnnnnnnnnnnnnnnnnnnnnnnnnnnnnnnnnnnnnnnnnnnnnnnnnnnnnnnnnnnnnnnnnnnnnnnnnnnnnnnnnnnnnnnnnnnnnnnnnnnnnnnnnnnnnnnnnnnnnnnnnnnnnnnnnnnnnnnnnnnnnnnnnnnnnnnnnnnnnnnnnnnnnnnnnnnnnnnnnnnnnnnnnnnnnnnnnnnnnnnnnnnnnnnnnnnnnnnnnnnnnnnnnnnnnnnnnnnnnnnnnnnnnnnnnnnnnnnnnnnnnnnnnnnnnnnnnnnnnnnnnnnnnnnnnnnnnnnnnnnnnnnnnnnnnnnnnnnnnnnnnnnnnnnnnnnnnnnnnnnnnnnnnnnnnnnnnnnnnnnnnnnnnnnnnnnnnnnnnnnnnnnnnnnnnnnnnnnnnnnnnnnnnnnnnnnnnnnnnnnnnnnnnnnnnnnnnnnnnnnnnnnnnnnnnnnnnnnnnnnnnnnnnnnnnnnnnnnnnnnnnnnnnnnnnnnnnnnnnnnnnnnnnnnnnnnnnnnnnnnnnnnnnnnnnnnnnnnnnnnnnnnnnnnnnnnnnnnnnnnnnnnnnnnnnnnnnnnnnnnnnnnnnnnnnnnnnnnnnnnnnnnnnnnnnnnnnnnnnnnnnnnnnnnnnnnnnnnnnnnnnnnnnnnnnnnnnnnnnnnnnnnnnnnnnnnnnnnnnnnnnnnnnnnnnnnnnnnnnnnnnnnnnnnnnnnnnnnnnnnnnnnnnnnnnnnnnnnnnnnnnnnnnnnnnnnnnnnnnnnnnnnnnnnnnnnnnnnnnnnnnnnnnnnnnnnnnnnnnnnnnnnnnnnnnnnnnnnnnnnnnnnnnnnnnnnnnnnnnnnnnnnnnnnnnnnnnnnnnnnnnnnnnnnnnnnnnnnnnnnnnnnnnnnnnnnnnnnnnnnnnnnnnnnnnnnnnnnnnnnnnnnnnnnnnnnnnnnnnnnnnnnnnnnnnnnnnnnnnnnnnnnnnnnnnnnnnnnnnnnnnnnnnnnnnnnnnnnnnnnnnnnnnnnnnnnnnnnnnnnnnnnnnnnnnnnnnnnnnnnnnnnnnnnnnnnnnnnnnnnnnnnnnnnnnnnnnnnnnnnnnnnnnnnnnnnnnnnnnnnnnnnnnnnnnnnnnnnnnnnnnnnnnnnnnnnnnnnnnnnnnnnnnnnnnnnnnnnnnnnnnnnnnnnnnnnnnnnnnnnnnnnnnnnnnnnnnnnnnnnnnnnnnnnnnnnnnnnnnnnnnnnnnnnnnnnnnnnnnnnnnnnnnnnnnnnnnnnnnnnnnnnnnnnnnnnnnnnnnnnnnnnnnnnnnnnnnnnnnnnnnnnnnnnnnnnnnnnnnnnnnnnnnnnnnnnnnnnnnnnnnnnnnnnnnnnnnnnnnnnnnnnnnnnnnnnnnnnnnnnnnnnnnnnnnnnnnnnnnnnnnnnnnnnnnnnnnnnnnnnnnnnnnnnnnnnnnnnnnnnnnnnnnnnnnnnnnnnnnnnnnnnnnnnnnnnnnnnnnnnnnnnnnnnnnnnnnnnnnnnnnnnnnnnnnnnnnnnnnnnnnnnnnnnnnnnnnnnnnnnnnnnnnnnnnnnnnnnnnnnnnnnnnnnnnnnnnnnnnnnnnnnnnnnnnnnnnnnnnnnnnnnnnnnnnnnnnnnnnnnnnnnnnnnnnnnnnnnnnnnnnnnnnnnnnnnnnnnnnnnnnnnnnnnnnnnnnnnnnnnnnnnnnnnnnnnnnnnnnnnnnnnnnnnnnnnnnnnnnnnnnnnnnnnnnnnnnnnnnnnnnnnnnnnnnnnnnnnnnnnnnnnnnnnnnnnnnnnnnnnnnnnnnnnnnnnnnnnnnnnnnnnnnnnnnnnnnnnnnnnnnnnnnnnnnnnnnnnnnnnnnnnnnnnnnnnnnnnnnnnnnnnnnnnnnnnnnnnnnnnnnnnnnnnnnnnnnnnnnnnnnnnnnnnnnnnnnnnnnnnnnnnnnnnnnnnnnnnnnnnnnnnnnnnnnnnnnnnnnnnnnnnnnnnnnnnnnnnnnnnnnnnnnnnnnnnnnnnnnnnnnnnnnnnnnnnnnnnnnnnnnnnnnnnnnnnnnnnnnnnnnnnnnnnnnnnnnnnnnnnnnnnnnnnnnnnnnnnnnnnnnnnnnnnnnnnnnnnnnnnnnnnnnnnnnnnnnnnnnnnnnnnnnnnnnnnnnnnnnnnnnnnnnnnnnnnnnnnnnnnnnnnnnnnnnnnnnnnnnnnnnnnnnnnnnnnnnnnnnnnnnnnnnnnnnnnnnnnnnnnnnnnnnnnnnnnnnnnnnnnnnnnnnnnnnnnnnnnnnnnnnnnnnnnnnnnnnnnnnnnnnnnnnnnnnnnnnnnnnnnnnnnnnnnnnnnnnnnnnnnnnnnnnnnnnnnnnnnnnnnnnnnnnnnnnnnnnnnnnnnnnnnnnnnnnnnnnnnnnnnnnnnnnnnnnnnnnnnnnnnnnnnnnnnnnnnnnnnnnnnnnnnnnnnnnnnnnnnnnnnnnnnnnnnnnnnnnnnnnnnnnnnnnnnnnnnnnnnnnnnnnnnnnnnnnnnnnnnnnnnnnnnnnnnnnnnnnnnnnnnnnnnnnnnnnnnnnnnnnnnnnnnnnnnnnnnnnnnnnnnnnnnnnnnnnnnnnnnnnnnnnnnnnnnnnnnnnnnnnnnnnnnnnnnnnnnnnnnnnnnnnnnnnnnnnnnnnnnnnnnnnnnnnnnnnnnnnnnnnnnnnnnnnnnnnnnnnnnnnnnnnnnnnnnnnnnnnnnnnnnnnnnnnnnnnnnnnnnnnnnnnnnnnnnnnnnnnnnnnnnnnnnnnnnnnnnnnnnnnnnnnnnnnnnnnnnnnnnnnnnnnnnnnnnnnnnnnnnnnnnnnnnnnnnnnnnnnnnnnnnnnnnnnnnnnnnnnnnnnnnnnnnnnnnnnnnnnnnnnnnnnnnnnnnnnnnnnnnnnnnnnnnnnnnnnnnnnnnnnnnnnnnnnnnnnnnnnnnnnnnnnnnnnnnnnnnnnnnnnnnnnnnnnnnnnnnnnnnnnnnnnnnnnnnnnnnnnnnnnnnnnnnnnnnnnnnnnnnnnnnnnnnnnnnnnnnnnnnnnnnnnnnnnnnnnnnnnnnnnnnnnnnnnnnnnnnnnnnnnnnnnnnnnnnnnnnnnnnnnnnnnnnnnnnnnnnnnnnnnnnnnnnnnnnnnnnnnnnnnnnnnnnnnnnnnnnnnnnnnnnnnnnnnnnnnnnnnnnnnnnnnnnnnnnnnnnnnnnnnnnnnnnnnnnnnnnnnnnnnnnnnnnnnnnnnnnnnnnnnnnnnnnnnnnnnnnnnnnnnnnnnnnnnnnnnnnnnnnnnnnnnnnnnnnnnnnnnnnnnnnnnnnnnnnnnnnnnnnnnnnnnnnnnnnnnnnnnnnnnnnnnnnnnnnnnnnnnnnnnnnnnnnnnnnnnnnnnnnnnnnnnnnnnnnnnnnnnnnnnnnnnnnnnnnnnnnnnnnnnnnnnnnnnnnnnnnnnnnnnnnnnnnnnnnnnnnnnnnnnnnnnnnnnnnnnnnnnnnnnnnnnnnnnnnnnnnnnnnnnnnnnnnnnnnnnnnnnnnnnnnnnnnnnnnnnnnnnnnnnnnnnnnnnnnnnnnnnnnnnnnnnnnnnnnnnnnnnnnnnnnnnnnnnnnnnnnnnnnnnnnnnnnnnnnnnnnnnnnnnnnnnnnnnnnnnnnnnnnnnnnnnnnnnnnnnnnnnnnnnnnnnnnnnnnnnnnnnnnnnnnnnnnnnnnnnnnnnnnnnnnnnnnnnnnnnnnnnnnnnnnnnnnnnnnnnnnnnnnnnnnnnnnnnnnnnnnnnnnnnnnnnnnnnnnnnnnnnnnnnnnnnnnnnnnnnnnnnnnnnnnnnnnnnnnnnnnnnnnnnnnnnnnnnnnnnnnnnnnnnnnnnnnnnnnnnnnnnnnnnnnnnnnnnnnnnnnnnnnnnnnnnnnnnnnnnnnnnnnnnnnnnnnnnnnnnnnnnnnnnnnnnnnnnnnnnnnnnnnnnnnnnnnnnnnnnnnnnnnnnnnnnnnnnnnnnnnnnnnnnnnnnnnnnnnnnnnnnnnnnnnnnnnnnnnnnnnnnnnnnnnnnnnnnnnnnnnnnnnnnnnnnnnnnnnnnnnnnnnnnnnnnnnnnnnnnnnnnnnnnnnnnnnnnnnnnnnnnnnnnnnnnnnnnnnnnnnnnnnnnnnnnnnnnnnnnnnnnnnnnnnnnnnnnnnnnnnnnnnnnnnnnnnnnnnnnnnnnnnnnnnnnnnnnnnnnnnnnnnnnnnnnnnnnnnnnnnnnnnnnnnnnnnnnnnnnnnnnnnnnnnnnnnnnnnnnnnnnnnnnnnnnnnnnnnnnnnnnnnnnnnnnnnnnnnnnnnnnnnnnnnnnnnnnnnnnnnnnnnnnnnnnnnnnnnnnnnnnnnnnnnnnnnnnnnnnnnnnnnnnnnnnnnnnnnnnnnnnnnnnnnnnnnnnnnnnnnnnnnnnnnnnnnnnnnnnnnnnnnnnnnnnnnnnnnnnnnnnnnnnnnnnnnnnnnnnnnnnnnnnnnnnnnnnnnnnnnnnnnnnnnnnnnnnnnnnnnnnnnnnnnnnnnnnnnnnnnnnnnnnnnnnnnnnnnnnnnnnnnnnnnnnnnnnnnnnnnnnnnnnnnnnnnnnnnnnnnnnnnnnnnnnnnnnnnnnnnnnnnnnnnnnnnnnnnnnnnnnnnnnnnnnnnnnnnnnnnnnnnnnnnnnnnnnnnnnnnnnnnnnnnnnnnnnnnnnnnnnnnnnnnnnnnnnnnnnnnnnnnnnnnnnnnnnnnnnnnnnnnnnnnnnnnnnnnnnnnnnnnnnnnnnnnnnnnnnnnnnnnnnnnnnnnnnnnnnnnnnnnnnnnnnnnnnnnnnnnnnnnnnnnnnnnnnnnnnnnnnnnnnnnnnnnnnnnnnnnnnnnnnnnnnnnnnnnnnnnnnnnnnnnnnnnnnnnnnnnnnnnnnnnnnnnnnnnnnnnnnnnnnnnnnnnnnnnnnnnnnnnnnnnnnnnnnnnnnnnnnnnnnnnnnnnnnnnnnnnnnnnnnnnnnnnnnnnnnnnnnnnnnnnnnnnnnnnnnnnnnnnnnnnnnnnnnnnnnnnnnnnnnnnnnnnnnnnnnnnnnnnnnnnnnnnnnnnnnnnnnnnnnnnnnnnnnnnnnnnnnnnnnnnnnnnnnnnnnnnnnnnnnnnnnnnnnnnnnnnnnnnnnnnnnnnnnnnnnnnnnnnnnnnnnnnnnnnnnnnnnnnnnnnnnnnnnnnnnnnnnnnnnnnnnnnnnnnnnnnnnnnnnnnnnnnnnnnnnnnnnnnnnnnnnnnnnnnnnnnnnnnnnnnnnnnnnnnnnnnnnnnnnnnnnnnnnnnnnnnnnnnnnnnnnnnnnnnnnnnnnnnnnnnnnnnnnnnnnnnnnnnnnnnnnnnnnnnnnnnnnnnnnnnnnnnnnnnnnnnnnnnnnnnnnnnnnnnnnnnnnnnnnnnnnnnnnnnnnnnnnnnnnnnnnnnnnnnnnnnnnnnnnnnnnnnnnnnnnnnnnnnnnnnnnnnnnnnnnnnnnnnnnnnnnnnnnnnnnnnnnnnnnnnnnnnnnnnnnnnnnnnnnnnnnnnnnnnnnnnnnnnnnnnnnnnnnnnnnnnnnnnnnnnnnnnnnnnnnnnnnnnnnnnnnnnnnnnnnnnnnnnnnnnnnnnnnnnnnnnnnnnnnnnnnnnnnnnnnnnnnnnnnnnnnnnnnnnnnnnnnnnnnnnnnnnnnnnnnnnnnnnnnnnnnnnnnnnnnnnnnnnnnnnnnnnnnnnnnnnnnnnnnnnnnnnnnnnnnnnnnnnnnnnnnnnnnnnnnnnnnnnnnnnnnnnnnnnnnnnnnnnnnnnnnnnnnnnnnnnnnnnnnnnnnnnnnnnnnnnnnnnnnnnnnnnnnnnnnnnnnnnnnnnnnnnnnnnnnnnnnnnnnnnnnnnnnnnnnnnnnnnnnnnnnnnnnnnnnnnnnnnnnnnnnnnnnnnnnnnnnnnnnnnnnnnnnnnnnnnnnnnnnnnnnnnnnnnnnnnnnnnnnnnnnnnnnnnnnnnnnnnnnnnnnnnnnnnnnnnnnnnnnnnnnnnnnnnnnnnnnnnnnnnnnnnnnnnnnnnnnnnnnnnnnnnnnnnnnnnnnnnnnnnnnnnnnnnnnnnnnnnnnnnnnnnnnnnnnnnnnnnnnnnnnnnnnnnnnnnnnnnnnnnnnnnnnnnnnnnnnnnnnnnnnnnnnnnnnnnnnnnnnnnnnnnnnnnnnnnnnnnnnnnnnnnnnnnnnnnnnnnnnnnnnnnnnnnnnnnnnnnnnnnnnnnnnnnnnnnnnnnnnnnnnnnnnnnnnnnnnnnnnnnnnnnnnnnnnnnnnnnnnnnnnnnnnnnnnnnnnnnnnnnnnnnnnnnnnnnnnnnnnnnnnnnnnnnnnnnnnnnnnnnnnnnnnnnnnnnnnnnnnnnnnnnnnnnnnnnnnnnnnnnnnnnnnnnnnnnnnnnnnnnnnnnnnnnnnnnnnnnnnnnnnnnnnnnnnnnnnnnnnnnnnnnnnnnnnnnnnnnnnnnnnnnnnnnnnnnnnnnnnnnnnnnnnnnnnnnnnnnnnnnnnnnnnnnnnnnnnnnnnnnnnnnnnnnnnnnnnnnnnnnnnnnnnnnnnnnnnnnnnnnnnnnnnnnnnnnnnnnnnnnnnnnnnnnnnnnnnnnnnnnnnnnnnnnnnnnnnnnnnnnnnnnnnnnnnnnnnnnnnnnnnnnnnnnnnnnnnnnnnnnnnnnnnnnnnnnnnnnnnnnnnnnnnnnnnnnnnnnnnnnnnnnnnnnnnnnnnnnnnnnnnnnnnnnnnnnnnnnnnnnnnnnnnnnnnnnnnnnnnnnnnnnnnnnnnnnnnnnnnnnnnnnnnnnnnnnnnnnnnnnnnnnnnnnnnnnnnnnnnnnnnnnnnnnnnnnnnnnnnnnnnnnnnnnnnnnnnnnnnnnnnnnnnnnnnnnnnnnnnnnnnnnnnnnnnnnnnnnnnnnnnnnnnnnnnnnnnnnnnnnnnnnnnnnnnnnnnnnnnnnnnnnnnnnnnnnnnnnnnnnnnnnnnnnnnnnnnnnnnnnnnnnnnnnnnnnnnnnnnnnnnnnnnnnnnnnnnnnnnnnnnnnnnnnnnnnnnnnnnnnnnnnnnnnnnnnnnnnnnnnnnnnnnnnnnnnnnnnnnnnnnnnnnnnnnnnnnnnnnnnnnnnnnnnnnnnnnnnnnnnnnnnnnnnnnnnnnnnnnnnnnnnnnnnnnnnnnnnnnnnnnnnnnnnnnnnnnnnnnnnnnnnnnnnnnnnnnnnnnnnnnnnnnnnnnnnnnnnnnnnnnnnnnnnnnnnnnnnnnnnnnnnnnnnnnnnnnnnnnnnnnnnnnnnnnnnnnnnnnnnnnnnnnnnnnnnnnnnnnnnnnnnnnnnnnnnnnnnnnnnnnnnnnnnnnnnnnnnnnnnnnnnnnnnnnnnnnnnnnnnnnnnnnnnnnnnnnnnnnnnnnnnnnnnnnnnnnnnnnnnnnnnnnnnnnnnnnnnnnnnnnnnnnnnnnnnnnnnnnnnnnnnnnnnnnnnnnnnnnnnnnnnnnnnnnnnnnnnnnnnnnnnnnnnnnnnnnnnnnnnnnnnnnnnnnnnnnnnnnnnnnnnnnnnnnnnnnnnnnnnnnnnnnnnnnnnnnnnnnnnnnnnnnnnnnnnnnnnnnnnnnnnnnnnnnnnnnnnnnnnnnnnnnnnnnnnnnnnnnnnnnnnnnnnnnnnnnnnnnnnnnnnnnnnnnnnnnnnnnnnnnnnnnnnnnnnnnnnnnnnnnnnnnnnnnnnnnnnnnnnnnnnnnnnnnnnnnnnnnnnnnnnnnnnnnnnnnnnnnnnnnnnnnnnnnnnnnnnnnnnnnnnnnnnnnnnnnnnnnnnnnnnnnnnnnnnnnnnnnnnnnnnnnnnnnnnnnnnnnnnnnnnnnnnnnnnnnnnnnnnnnnnnnnnnnnnnnnnnnnnnnnnnnnnnnnnnnnnnnnnnnnnnnnnnnnnnnnnnnnnnnnnnnnnnnnnnnnnnnnnnnnnnnnnnnnnnnnnnnnnnnnnnnnnnnnnnnnnnnnnnnnnnnnnnnnnnnnnnnnnnnnnnnnnnnnnnnnnnnnnnnnnnnnnnnnnnnnnnnnnnnnnnnnnnnnnnnnnnnnnnnnnnnnnnnnnnnnnnnnnnnnnnnnnnnnnnnnnnnnnnnnnnnnnnnnnnnnnnnnnnnnnnnnnnnnnnnnnnnnnnnnnnnnnnnnnnnnnnnnnnnnnnnnnnnnnnnnnnnnnnnnnnnnnnnnnnnnnnnnnnnnnnnnnnnnnnnnnnnnnnnnnnnnnnnnnnnnnnnnnnnnnnnnnnnnnnnnnnnnnnnnnnnnnnnnnnnnnnnnnnnnnnnnnnnnnnnnnnnnnnnnnnnnnnnnnnnnnnnnnnnnnnnnnnnnnnnnnnnnnnnnnnnnnnnnnnnnnnnnnnnnnnnnnnnnnnnnnnnnnnnnnnnnnnnnnnnnnnnnnnnnnnnnnnnnnnnnnnnnnnnnnnnnnnnnnnnnnnnnnnnnnnnnnnnnnnnnnnnnnnnnnnnnnnnnnnnnnnnnnnnnnnnnnnnnnnnnnnnnnnnnnnnnnnnnnnnnnnnnnnnnnnnnnnnnnnnnnnnnnnnnnnnnnnnnnnnnnnnnnnnnnnnnnnnnnnnnnnnnnnnnnnnnnnnnnnnnnnnnnnnnnnnnnnnnnnnnnnnnnnnnnnnnnnnnnnnnnnnnnnnnnnnnnnnnnnnnnnnnnnnnnnnnnnnnnnnnnnnnnnnnnnnnnnnnnnnnnnnnnnnnnnnnnnnnnnnnnnnnnnnnnnnnnnnnnnnnnnnnnnnnnnnnnnnnnnnnnnnnnnnnnnnnnnnnnnnnnnnnnnnnnnnnnnnnnnnnnnnnnnnnnnnnnnnnnnnnnnnnnnnnnnnnnnnnnnnnnnnnnnnnnnnnnnnnnnnnnnnnnnnnnnnnnnnnnnnnnnnnnnnnnnnnnnnnnnnnnnnnnnnnnnnnnnnnnnnnnnnnnnnnnnnnnnnnnnnnnnnnnnnnnnnnnnnnnnnnnnnnnnnnnnnnnnnnnnnnnnnnnnnnnnnnnnnnnnnnnnnnnnnnnnnnnnnnnnnnnnnnnnnnnnnnnnnnnnnnnnnnnnnnnnnnnnnnnnnnnnnnnnnnnnnnnnnnnnnnnnnnnnnnnnnnnnnnnnnnnnnnnnnnnnnnnnnnnnnnnnnnnnnnnnnnnnnnnnnnnnnnnnnnnnnnnnnnnnnnnnnnnnnnnnnnnnnnnnnnnnnnnnnnnnnnnnnnnnnnnnnnnnnnnnnnnnnnnnnnnnnnnnnnnnnnnnnnnnnnnnnnnnnnnnnnnnnnnnnnnnnnnnnnnnnnnnnnnnnnnnnnnnnnnnnnnnnnnnnnnnnnnnnnnnnnnnnnnnnnnnnnnnnnnnnnnnnnnnnnnnnnnnnnnnnnnnnnnnnnnnnnnnnnnnnnnnnnnnnnnnnnnnnnnnnnnnnnnnnnnnnnnnnnnnnnnnnnnnnnnnnnnnnnnnnnnnnnnnnnnnnnnnnnnnnnnnnnnnnnnnnnnnnnnnnnnnnnnnnnnnnnnnnnnnnnnnnnnnnnnnnnnnnnnnnnnnnnnnnnnnnnnnnnnnnnnnnnnnnnnnnnnnnnnnnnnnnnnnnnnnnnnnnnnnnnnnnnnnnnnnnnnnnnnnnnnnnnnnnnnnnnnnnnnnnnnnnnnnnnnnnnnnnnnnnnnnnnnnnnnnnnnnnnnnnnnnnnnnnnnnnnnnnnnnnnnnnnnnnnnnnnnnnnnnnnnnnnnnnnnnnnnnnnnnnnnnnnnnnnnnnnnnnnnnnnnnnnnnnnnnnnnnnnnnnnnnnnnnnnnnnnnnnnnnnnnnnnnnnnnnnnnnnnnnnnnnnnnnnnnnnnnnnnnnnnnnnnnnnnnnnnnnnnnnnnnnnnnnnnnnnnnnnnnnnnnnnnnnnnnnnnnnnnnnnnnnnnnnnnnnnnnnnnnnnnnnnnnnnnnnnnnnnnnnnnnnnnnnnnnnnnnnnnnnnnnnnnnnnnnnnnnnnnnnnnnnnnnnnnnnnnnnnnnnnnnnnnnnnnnnnnnnnnnnnnnnnnnnnnnnnnnnnnnnnnnnnnnnnnnnnnnnnnnnnnnnnnnnnnnnnnnnnnnnnnnnnnnnnnnnnnnnnnnnnnnnnnnnnnnnnnnnnnnnnnnnnnnnnnnnnnnnnnnnnnnnnnnnnnnnnnnnnnnnnnnnnnnnnnnnnnnnnnnnnnnnnnnnnnnnnnnnnnnnnnnnnnnnnnnnnnnnnnnnnnnnnnnnnnnnnnnnnnnnnnnnnnnnnnnnnnnnnnnnnnnnnnnnnnnnnnnnnnnnnnnnnnnnnnnnnnnnnnnnnnnnnnnnnnnnnnnnnnnnnnnnnnnnnnnnnnnnnnnnnnnnnnnnnnnnnnnnnnnnnnnnnnnnnnnnnnnnnnnnnnnnnnnnnnnnnnnnnnnnnnnnnnnnnnnnnnnnnnnnnnnnnnnnnnnnnnnnnnnnnnnnnnnnnnnnnnnnnnnnnnnnnnnnnnnnnnnnnnnnnnnnnnnnnnnnnnnnnnnnnnnnnnnnnnnnnnnnnnnnnnnnnnnnnnnnnnnnnnnnnnnnnnnnnnnnnnnnnnnnnnnnnnnnnnnnnnnnnnnnnnnnnnnnnnnnnnnnnnnnnnnnnnnnnnnnnnnnnnnnnnnnnnnnnnnnnnnnnnnnnnnnnnnnnnnnnnnnnnnnnnnnnnnnnnnnnnnnnnnnnnnnnnnnnnnnnnnnnnnnnnnnnnnnnnnnnnnnnnnnnnnnnnnnnnnnnnnnnnnnnnnnnnnnnnnnnnnnnnnnnnnnnnnnnnnnnnnnnnnnnnnnnnnnnnnnnnnnnnnnnnnnnnnnnnnnnnnnnnnnnnnnnnnnnnnnnnnnnnnnnnnnnnnnnnnnnnnnnnnnnnnnnnnnnnnnnnnnnnnnnnnnnnnnnnnnnnnnnnnnnnnnnnnnnnnnnnnnnnnnnnnnnnnnnnnnnnnnnnnnnnnnnnnnnnnnnnnnnnnnnnnnnnnnnnnnnnnnnnnnnnnnnnnnnnnnnnnnnnnnnnnnnnnnnnnnnnnnnnnnnnnnnnnnnnnnnnnnnnnnnnnnnnnnnnnnnnnnnnnnnnnnnnnnnnnnnnnnnnnnnnnnnnnnnnnnnnnnnnnnnnnnnnnnnnnnnnnnnnnnnnnnnnnnnnnnnnnnnnnnnnnnnnnnnnnnnnnnnnnnnnnnnnnnnnnnnnnnnnnnnnnnnnnnnnnnnnnnnnnnnnnnnnnnnnnnnnnnnnnnnnnnnnnnnnnnnnnnnnnnnnnnnnnnnnnnnnnnnnnnnnnnnnnnnnnnnnnnnnnnnnnnnnnnnnnnnnnnnnnnnnnnnnnnnnnnnnnnnnnnnnnnnnnnnnnnnnnnnnnnnnnnnnnnnnnnnnnnnnnnnnnnnnnnnnnnnnnnnnnnnnnnnnnnnnnnnnnnnnnnnnnnnnnnnnnnnnnnnnnnnnnnnnnnnnnnnnnnnnnnnnnnnnnnnnnnnnnnnnnnnnnnnnnnnnnnnnnnnnnnnnnnnnnnnnnnnnnnnnnnnnnnnnnnnnnnnnnnnnnnnnnnnnnnnnnnnnnnnnnnnnnnnnnnnnnnnnnnnnnnnnnnnnnnnnnnnnnnnnnnnnnnnnnnnnnnnnnnnnnnnnnnnnnnnnnnnnnnnnnnnnnnnnnnnnnnnnnnnnnnnnnnnnnnnnnnnnnnnnnnnnnnnnnnnnnnnnnnnnnnnnnnnnnnnnnnnnnnnnnnnnnnnnnnnnnnnnnnnnnnnnnnnnnnnnnnnnnnnnnnnnnnnnnnnnnnnnnnnnnnnnnnnnnnnnnnnnnnnnnnnnnnnnnnnnnnnnnnnnnnnnnnnnnnnnnnnnnnnnnnnnnnnnnnnnnnnnnnnnnnnnnnnnnnnnnnnnnnnnnnnnnnnnnnnnnnnnnnnnnnnnnnnnnnnnnnnnnnnnnnnnnnnnnnnnnnnnnnnnnnnnnnnnnnnnnnnnnnnnnnnnnnnnnnnnnnnnnnnnnnnnnnnnnnnnnnnnnnnnnnnnnnnnnnnnnnnnnnnnnnnnnnnnnnnnnnnnnnnnnnnnnnnnnnnnnnnnnnnnnnnnnnnnnnnnnnnnnnnnnnnnnnnnnnnnnnnnnnnnnnnnnnnnnnnnnnnnnnnnnnnnnnnnnnnnnnnnnnnnnnnnnnnnnnnnnnnnnnnnnnnnnnnnnnnnnnnnnnnnnnnnnnnnnnnnnnnnnnnnnnnnnnnnnnnnnnnnnnnnnnnnnnnnnnnnnnnnnnnnnnnnnnnnnnnnnnnnnnnnnnnnnnnnnnnnnnnnnnnnnnnnnnnnnnnnnnnnnnnnnnnnnnnnnnnnnnnnnnnnnnnnnnnnnnnnnnnnnnnnnnnnnnnnnnnnnnnnnnnnnnnnnnnnnnnnnnnnnnnnnnnnnnnnnnnnnnnnnnnnnnnnnnnnnnnnnnnnnnnnnnnnnnnnnnnnnnnnnnnnnnnnnnnnnnnnnnnnnnnnnnnnnnnnnnnnnnnnnnnnnnnnnnnnnnnnnnnnnnnnnnnnnnnnnnnnnnnnnnnnnnnnnnnnnnnnnnnnnnnnnnnnnnnnnnnnnnnnnnnnnnnnnnnnnnnnnnnnnnnnnnnnnnnnnnnnnnnnnnnnnnnnnnnnnnnnnnnnnnnnnnnnnnnnnnnnnnnnnnnnnnnnnnnnnnnnnnnnnnnnnnnnnnnnnnnnnnnnnnnnnnnnnnnnnnnnnnnnnnnnnnnnnnnnnnnnnnnnnnnnnnnnnnnnnnnnnnnnnnnnnnnnnnnnnnnnnnnnnnnnnnnnnnnnnnnnnnnnnnnnnnnnnnnnnnnnnnnnnnnnnnnnnnnnnnnnnnnnnnnnnnnnnnnnnnnnnnnnnnnnnnnnnnnnnnnnnnnnnnnnnnnnnnnnnnnnnnnnnnnnnnnnnnnnnnnnnnnnnnnnnnnnnnnnnnnnnnnnnnnnnnnnnnnnnnnnnnnnnnnnnnnnnnnnnnnnnnnnnnnnnnnnnnnnnnnnnnnnnnnnnnnnnnnnnnnnnnnnnnnnnnnnnnnnnnnnnnnnnnnnnnnnnnnnnnnnnnnnnnnnnnnnnnnnnnnnnnnnnnnnnnnnnnnnnnnnnnnnnnnnnnnnnnnnnnnnnnnnnnnnnnnnnnnnnnnnnnnnnnnnnnnnnnnnnnnnnnnnnnnnnnnnnnnnnnnnnnnnnnnnnnnnnnnnnnnnnnnnnnnnnnnnnnnnnnnnnnnnnnnnnnnnnnnnnnnnnnnnnnnnnnnnnnnnnnnnnnnnnnnnnnnnnnnnnnnnnnnnnnnnnnnnnnnnnnnnnnnnnnnnnnnnnnnnnnnnnnnnnnnnnnnnnnnnnnnnnnnnnnnnnnnnnnnnnnnnnnnnnnnnnnnnnnnnnnnnnnnnnnnnnnnnnnnnnnnnnnnnnnnnnnnnnnnnnnnnnnnnnnnnnnnnnnnnnnnnnnnnnnnnnnnnnnnnnnnnnnnnnnnnnnnnnnnnnnnnnnnnnnnnnnnnnnnnnnnnnnnnnnnnnnnnnnnnnnnnnnnnnnnnnnnnnnnnnnnnnnnnnnnnnnnnnnnnnnnnnnnnnnnnnnnnnnnnnnnnnnnnnnnnnnnnnnnnnnnnnnnnnnnnnnnnnnnnnnnnnnnnnnnnnnnnnnnnnnnnnnnnnnnnnnnnnnnnnnnnnnnnnnnnnnnnnnnnnnnnnnnnnnnnnnnnnnnnnnnnnnnnnnnnnnnnnnnnnnnnnnnnnnnnnnnnnnnnnnnnnnnnnnnnnnnnnnnnnnnnnnnnnnnnnnnnnnnnnnnnnnnnnnnnnnnnnnnnnnnnnnnnnnnnnnnnnnnnnnnnnnnnnnnnnnnnnnnnnnnnnnnnnnnnnnnnnnnnnnnnnnnnnnnnnnnnnnnnnnnnnnnnnnnnnnnnnnnnnnnnnnnnnnnnnnnnnnnnnnnnnnnnnnnnnnnnnnnnnnnnnnnnnnnnnnnnnnnnnnnnnnnnnnnnnnnnnnnnnnnnnnnnnnnnnnnnnnnnnnnnnnnnnnnnnnnnnnnnnnnnnnnnnnnnnnnnnnnnnnnnnnnnnnnnnnnnnnnnnnnnnnnnnnnnnnnnnnnnnnnnnnnnnnnnnnnnnnnnnnnnnnnnnnnnnnnnnnnnnnnnnnnnnnnnnnnnnnnnnnnnnnnnnnnnnnnnnnnnnnnnnnnnnnnnnnnnnnnnnnnnnnnnnnnnnnnnnnnnnnnnnnnnnnnnnnnnnnnnnnnnnnnnnnnnnnnnnnnnnnnnnnnnnnnnnnnnnnnnnnnnnnnnnnnnnnnnnnnnnnnnnnnnnnnnnnnnnnnnnnnnnnnnnnnnnnnnnnnnnnnnnnnnnnnnnnnnnnnnnnnnnnnnnnnnnnnnnnnnnnnnnnnnnnnnnnnnnnnnnnnnnnnnnnnnnnnnnnnnnnnnnnnnnnnnnnnnnnnnnnnnnnnnnnnnnnnnnnnnnnnnnnnnnnnnnnnnnnnnnnnnnnnnnnnnnnnnnnnnnnnnnnnnnnnnnnnnnnnnnnnnnnnnnnnnnnnnnnnnnnnnnnnnnnnnnnnnnnnnnnnnnnnnnnnnnnnnnnnnnnnnnnnnnnnnnnnnnnnnnnnnnnnnnnnnnnnnnnnnnnnnnnnnnnnnnnnnnnnnnnnnnnnnnnnnnnnnnnnnnnnnnnnnnnnnnnnnnnnnnnnnnnnnnnnnnnnnnnnnnnnnnnnnnnnnnnnnnnnnnnnnnnnnnnnnnnnnnnnnnnnnnnnnnnnnnnnnnnnnnnnnnnnnnnnnnnnnnnnnnnnnnnnnnnnnnnnnnnnnnnnnnnnnnnnnnnnnnnnnnnnnnnnnnnnnnnnnnnnnnnnnnnnnnnnnnnnnnnnnnnnnnnnnnnnnnnnnnnnnnnnnnnnnnnnnnnnnnnnnnnnnnnnnnnnnnnnnnnnnnnnnnnnnnnnnnnnnnnnnnnnnnnnnnnnnnnnnnnnnnnnnnnnnnnnnnnnnnnnnnnnnnnnnnnnnnnnnnnnnnnnnnnnnnnnnnnnnnnnnnnnnnnnnnnnnnnnnnnnnnnnnnnnnnnnnnnnnnnnnnnnnnnnnnnnnnnnnnnnnnnnnnnnnnnnnnnnnnnnnnnnnnnnnnnnnnnnnnnnnnnnnnnnnnnnnnnnnnnnnnnnnnnnnnnnnnnnnnnnnnnnnnnnnnnnnnnnnnnnnnnnnnnnnnnnnnnnnnnnnnnnnnnnnnnnnnnnnnnnnnnnnnnnnnnnnnnnnnnnnnnnnnnnnnnnnnnnnnnnnnnnnnnnnnnnnnnnnnnnnnnnnnnnnnnnnnnnnnnnnnnnnnnnnnnnnnnnnnnnnnnnnnnnnnnnnnnnnnnnnnnnnnnnnnnnnnnnnnnnnnnnnnnnnnnnnnnnnnnnnnnnnnnnnnnnnnnnnnnnnnnnnnnnnnnnnnnnnnnnnnnnnnnnnnnnnnnnnnnnnnnnnnnnnnnnnnnnnnnnnnnnnnnnnnnnnnnnnnnnnnnnnnnnnnnnnnnnnnnnnnnnnnnnnnnnnnnnnnnnnnnnnnnnnnnnnnnnnnnnnnnnnnnnnnnnnnnnnnnnnnnnnnnnnnnnnnnnnnnnnnnnnnnnnnnnnnnnnnnnnnnnnnnnnnnnnnnnnnnnnnnnnnnnnnnnnnnnnnnnnnnnnnnnnnnnnnnnnnnnnnnnnnnnnnnnnnnnnnnnnnnnnnnnnnnnnnnnnnnnnnnnnnnnnnnnnnnnnnnnnnnnnnnnnnnnnnnnnnnnnnnnnnnnnnnnnnnnnnnnnnnnnnnnnnnnnnnnnnnnnnnnnnnnnnnnnnnnnnnnnnnnnnnnnnnnnnnnnnnnnnnnnnnnnnnnnnnnnnnnnnnnnnnnnnnnnnnnnnnnnnnnnnnnnnnnnnnnnnnnnnnnnnnnnnnnnnnnnnnnnnnnnnnnnnnnnnnnnnnnnnnnnnnnnnnnnnnnnnnnnnnnnnnnnnnnnnnnnnnnnnnnnnnnnnnnnnnnnnnnnnnnnnnnnnnnnnnnnnnnnnnnnnnnnnnnnnnnnnnnnnnnnnnnnnnnnnnnnnnnnnnnnnnnnnnnnnnnnnnnnnnnnnnnnnnnnnnnnnnnnnnnnnnnnnnnnnnnnnnnnnnnnnnnnnnnnnnnnnnnnnnnnnnnnnnnnnnnnnnnnnnnnnnnnnnnnnnnnnnnnnnnnnnnnnnnnnnnnnnnnnnnnnnnnnnnnnnnnnnnnnnnnnnnnnnnnnnnnnnnnnnnnnnnnnnnnnnnnnnnnnnnnnnnnnnnnnnnnnnnnnnnnnnnnnnnnnnnnnnnnnnnnnnnnnnnnnnnnnnnnnnnnnnnnnnnnnnnnnnnnnnnnnnnnnnnnnnnnnnnnnnnnnnnnnnnnnnnnnnnnnnnnnnnnnnnnnnnnnnnnnnnnnnnnnnnnnnnnnnnnnnnnnnnnnnnnnnnnnnnnnnnnnnnnnnnnnnnnnnnnnnnnnnnnnnnnnnnnnnnnnnnnnnnnnnnnnnnnnnnnnnnnnnnnnnnnnnnnnnnnnnnnnnnnnnnnnnnnnnnnnnnnnnnnnnnnnnnnnnnnnnnnnnnnnnnnnnnnnnnnnnnnnnnnnnnnnnnnnnnnnnnnnnnnnnnnnnnnnnnnnnnnnnnnnnnnnnnnnnnnnnnnnnnnnnnnnnnnnnnnnnnnnnnnnnnnnnnnnnnnnnnnnnnnnnnnnnnnnnnnnnnnnnnnnnnnnnnnnnnnnnnnnnnnnnnnnnnnnnnnnnnnnnnnnnnnnnnnnnnnnnnnnnnnnnnnnnnnnnnnnnnnnnnnnnnnnnnnnnnnnnnnnnnnnnnnnnnnnnnnnnnnnnnnnnnnnnnnnnnnnnnnnnnnnnnnnnnnnnnnnnnnnnnnnnnnnnnnnnnnnnnnnnnnnnnnnnnnnnnnnnnnnnnnnnnnnnnnnnnnnnnnnnnnnnnnnnnnnnnnnnnnnnnnnnnnnnnnnnnnnnnnnnnnnnnnnnnnnnnnnnnnnnnnnnnnnnnnnnnnnnnnnnnnnnnnnnnnnnnnnnnnnnnnnnnnnnnnnnnnnnnnnnnnnnnnnnnnnnnnnnnnnnnnnnnnnnnnnnnnnnnnnnnnnnnnnnnnnnnnnnnnnnnnnnnnnnnnnnnnnnnnnnnnnnnnnnnnnnnnnnnnnnnnnnnnnnnnnnnnnnnnnnnnnnnnnnnnnnnnnnnnnnnnnnnnnnnnnnnnnnnnnnnnnnnnnnnnnnnnnnnnnnnnnnnnnnnnnnnnnnnnnnnnnnnnnnnnnnnnnnnnnnnnnnnnnnnnnnnnnnnnnnnnnnnnnnnnnnnnnnnnnnnnnnnnnnnnnnnnnnnnnnnnnnnnnnnnnnnnnnnnnnnnnnnnnnnnnnnnnnnnnnnnnnnnnnnnnnnnnnnnnnnnnnnnnnnnnnnnnnnnnnnnnnnnnnnnnnnnnnnnnnnnnnnnnnnnnnnnnnnnnnnnnnnnnnnnnnnnnnnnnnnnnnnnnnnnnnnnnnnnnnnnnnnnnnnnnnnnnnnnnnnnnnnnnnnnnnnnnnnnnnnnnnnnnnnnnnnnnnnnnnnnnnnnnnnnnnnnnnnnnnnnnnnnnnnnnnnnnnnnnnnnnnnnnnnnnnnnnnnnnnnnnnnnnnnnnnnnnnnnnnnnnnnnnnnnnnnnnnnnnnnnnnnnnnnnnnnnnnnnnnnnnnnnnnnnnnnnnnnnnnnnnnnnnnnnnnnnnnnnnnnnnnnnnnnnnnnnnnnnnnnnnnnnnnnnnnnnnnnnnnnnnnnnnnnnnnnnnnnnnnnnnnnnnnnnnnnnnnnnnnnnnnnnnnnnnnnnnnnnnnnnnnnnnnnnnnnnnnnnnnnnnnnnnnnnnnnnnnnnnnnnnnnnnnnnnnnnnnnnnnnnnnnnnnnnnnnnnnnnnnnnnnnnnnnnnnnnnnnnnnnnnnnnnnnnnnnnnnnnnnnnnnnnnnnnnnnnnnnnnnnnnnnnnnnnnnnnnnnnnnnnnnnnnnnnnnnnnnnnnnnnnnnnnnnnnnnnnnnnnnnnnnnnnnnnnnnnnnnnnnnnnnnnnnnnnnnnnnnnnnnnnnnnnnnnnnnnnnnnnnnnnnnnnnnnnnnnnnnnnnnnnnnnnnnnnnnnnnnnnnnnnnnnnnnnnnnnnnnnnnnnnnnnnnnnnnnnnnnnnnnnnnnnnnnnnnnnnnnnnnnnnnnnnnnnnnnnnnnnnnnnnnnnnnnnnnnnnnnnnnnnnnnnnnnnnnnnnnnnnnnnnnnnnnnnnnnnnnnnnnnnnnnnnnnnnnnnnnnnnnnnnnnnnnnnnnnnnnnnnnnnnnnnnnnnnnnnnnnnnnnnnnnnnnnnnnnnnnnnnnnnnnnnnnnnnnnnnnnnnnnnnnnnnnnnnnnnnnnnnnnnnnnnnnnnnnnnnnnnnnnnnnnnnnnnnnnnnnnnnnnnnnnnnnnnnnnnnnnnnnnnnnnnnnnnnnnnnnnnnnnnnnnnnnnnnnnnnnnnnnnnnnnnnnnnnnnnnnnnnnnnnnnnnnnnnnnnnnnnnnnnnnnnnnnnnnnnnnnnnnnnnnnnnnnnnnnnnnnnnnnnnnnnnnnnnnnnnnnnnnnnnnnnnnnnnnnnnnnnnnnnnnnnnnnnnnnnnnnnnnnnnnnnnnnnnnnnnnnnnnnnnnnnnnnnnnnnnnnnnnnnnnnnnnnnnnnnnnnnnnnnnnnnnnnnnnnnnnnnnnnnnnnnnnnnnnnnnnnnnnnnnnnnnnnnnnnnnnnnnnnnnnnnnnnnnnnnnnnnnnnnnnnnnnnnnnnnnnnnnnnnnnnnnnnnnnnnnnnnnnnnnnnnnnnnnnnnnnnnnnnnnnnnnnnnnnnnnnnnnnnnnnnnnnnnnnnnnnnnnnnnnnnnnnnnnnnnnnnnnnnnnnnnnnnnnnnnnnnnnnnnnnnnnnnnnnnnnnnnnnnnnnnnnnnnnnnnnnnnnnnnnnnnnnnnnnnnnnnnnnnnnnnnnnnnnnnnnnnnnnnnnnnnnnnnnnnnnnnnnnnnnnnnnnnnnnnnnnnnnnnnnnnnnnnnnnnnnnnnnnnnnnnnnnnnnnnnnnnnnnnnnnnnnnnnnnnnnnnnnnnnnnnnnnnnnnnnnnnnnnnnnnnnnnnnnnnnnnnnnnnnnnnnnnnnnnnnnnnnnnnnnnnnnnnnnnnnnnnnnnnnnnnnnnnnnnnnnnnnnnnnnnnnnnnnnnnnnnnnnnnnnnnnnnnnnnnnnnnnnnnnnnnnnnnnnnnnnnnnnnnnnnnnnnnnnnnnnnnnnnnnnnnnnnnnnnnnnnnnnnnnnnnnnnnnnnnnnnnnnnnnnnnnnnnnnnnnnnnnnnnnnnnnnnnnnnnnnnnnnnnnnnnnnnnnnnnnnnnnnnnnnnnnnnnnnnnnnnnnnnnnnnnnnnnnnnnnnnnnnnnnnnnnnnnnnnnnnnnnnnnnnnnnnnnnnnnnnnnnnnnnnnnnnnnnnnnnnnnnnnnnnnnnnnnnnnnnnnnnnnnnnnnnnnnnnnnnnnnnnnnnnnnnnnnnnnnnnnnnnnnnnnnnnnnnnnnnnnnnnnnnnnnnnnnnnnnnnnnnnnnnnnnnnnnnnnnnnnnnnnnnnnnnnnnnnnnnnnnnnnnnnnnnnnnnnnnnnnnnnnnnnnnnnnnnnnnnnnnnnnnnnnnnnnnnnnnnnnnnnnnnnnnnnnnnnnnnnnnnnnnnnnnnnnnnnnnnnnnnnnnnnnnnnnnnnnnnnnnnnnnnnnnnnnnnnnnnnnnnnnnnnnnnnnnnnnnnnnnnnnnnnnnnnnnnnnnnnnnnnnnnnnnnnnnnnnnnnnnnnnnnnnnnnnnnnnnnnnnnnnnnnnnnnnnnnnnnnnnnnnnnnnnnnnnnnnnnnnnnnnnnnnnnnnnnnnnnnnnnnnnnnnnnnnnnnnnnnnnnnnnnnnnnnnnnnnnnnnnnnnnnnnnnnnnnnnnnnnnnnnnnnnnnnnnnnnnnnnnnnnnnnnnnnnnnnnnnnnnnnnnnnnnnnnnnnnnnnnnnnnnnnnnnnnnnnnnnnnnnnnnnnnnnnnnnnnnnnnnnnnnnnnnnnnnnnnnnnnnnnnnnnnnnnnnnnnnnnnnnnnnnnnnnnnnnnnnnnnnnnnnnnnnnnnnnnnnnnnnnnnnnnnnnnnnnnnnnnnnnnnnnnnnnnnnnnnnnnnnnnnnnnnnnnnnnnnnnnnnnnnnnnnnnnnnnnnnnnnnnnnnnnnnnnnnnnnnnnnnnnnnnnnnnnnnnnnnnnnnnnnnnnnnnnnnnnnnnnnnnnnnnnnnnnnnnnnnnnnnnnnnnnnnnnnnnnnnnnnnnnnnnnnnnnnnnnnnnnnnnnnnnnnnnnnnnnnnnnnnnnnnnnnnnnnnnnnnnnnnnnnnnnnnnnnnnnnnnnnnnnnnnnnnnnnnnnnnnnnnnnnnnnnnnnnnnnnnnnnnnnnnnnnnnnnnnnnnnnnnnnnnnnnnnnnnnnnnnnnnnnnnnnnnnnnnnnnnnnnnnnnnnnnnnnnnnnnnnnnnnnnnnnnnnnnnnnnnnnnnnnnnnnnnnnnnnnnnnnnnnnnnnnnnnnnnnnnnnnnnnnnnnnnnnnnnnnnnnnnnnnnnnnnnnnnnnnnnnnnnnnnnnnnnnnnnnnnnnnnnnnnnnnnnnnnnnnnnnnnnnnnnnnnnnnnnnnnnnnnnnnnnnnnnnnnnnnnnnnnnnnnnnnnnnnnnnnnnnnnnnnnnnnnnnnnnnnnnnnnnnnnnnnnnnnnnnnnnnnnnnnnnnnnnnnnnnnnnnnnnnnnnnnnnnnnnnnnnnnnnnnnnnnnnnnnnnnnnnnnnnnnnnnnnnnnnnnnnnnnnnnnnnnnnnnnnnnnnnnnnnnnnnnnnnnnnnnnnnnnnnnnnnnnnnnnnnnnnnnnnnnnnnnnnnnnnnnnnnnnnnnnnnnnnnnnnnnnnnnnnnnnnnnnnnnnnnnnnnnnnnnnnnnnnnnnnnnnnnnnnnnnnnnnnnnnnnnnnnnnnnnnnnnnnnnnnnnnnnnnnnnnnnnnnnnnnnnnnnnnnnnnnnnnnnnnnnnnnnnnnnnnnnnnnnnnnnnnnnnnnnnnnnnnnnnnnnnnnnnnnnnnnnnnnnnnnnnnnnnnnnnnnnnnnnnnnnnnnnnnnnnnnnnnnnnnnnnnnnnnnnnnnnnnnnnnnnnnnnnnnnnnnnnnnnnnnnnnnnnnnnnnnnnnnnnnnnnnnnnnnnnnnnnnnnnnnnnnnnnnnnnnnnnnnnnnnnnnnnnnnnnnnnnnnnnnnnnnnnnnnnnnnnnnnnnnnnnnnnnnnnnnnnnnnnnnnnnnnnnnnnnnnnnnnnnnnnnnnnnnnnnnnnnnnnnnnnnnnnnnnnnnnnnnnnnnnnnnnnnnnnnnnnnnnnnnnnnnnnnnnnnnnnnnnnnnnnnnnnnnnnnnnnnnnnnnnnnnnnnnnnnnnnnnnnnnnnnnnnnnnnnnnnnnnnnnnnnnnnnnnnnnnnnnnnnnnnnnnnnnnnnnnnnnnnnnnnnnnnnnnnnnnnnnnnnnnnnnnnnnnnnnnnnnnnnnnnnnnnnnnnnnnnnnnnnnnnnnnnnnnnnnnnnnnnnnnnnnnnnnnnnnnnnnnnnnnnnnnnnnnnnnnnnnnnnnnnnnnnnnnnnnnnnnnnnnnnnnnnnnnnnnnnnnnnnnnnnnnnnnnnnnnnnnnnnnnnnnnnnnnnnnnnnnnnnnnnnnnnnnnnnnnnnnnnnnnnnnnnnnnnnnnnnnnnnnnnnnnnnnnnnnnnnnnnnnnnnnnnnnnnnnnnnnnnnnnnnnnnnnnnnnnnnnnnnnnnnnnnnnnnnnnnnnnnnnnnnnnnnnnnnnnnnnnnnnnnnnnnnnnnnnnnnnnnnnnnnnnnnnnnnnnnnnnnnnnnnnnnnnnnnnnnnnnnnnnnnnnnnnnnnnnnnnnnnnnnnnnnnnnnnnnnnnnnnnnnnnnnnnnnnnnnnnnnnnnnnnnnnnnnnnnnnnnnnnnnnnnnnnnnnnnnnnnnnnnnnnnnnnnnnnnnnnnnnnnnnnnnnnnnnnnnnnnnnnnnnnnnnnnnnnnnnnnnnnnnnnnnnnnnnnnnnnnnnnnnnnnnnnnnnnnnnnnnnnnnnnnnnnnnnnnnnnnnnnnnnnnnnnnnnnnnnnnnnnnnnnnnnnnnnnnnnnnnnnnnnnnnnnnnnnnnnnnnnnnnnnnnnnnnnnnnnnnnnnnnnnnnnnnnnnnnnnnnnnnnnnnnnnnnnnnnnnnnnnnnnnnnnnnnnnnnnnnnnnnnnnnnnnnnnnnnnnnnnnnnnnnnnnnnnnnnnnnnnnnnnnnnnnnnnnnnnnnnnnnnnnnnnnnnnnnnnnnnnnnnnnnnnnnnnnnnnnnnnnnnnnnnnnnnnnnnnnnnnnnnnnnnnnnnnnnnnnnnnnnnnnnnnnnnnnnnnnnnnnnnnnnnnnnnnnnnnnnnnnnnnnnnnnnnnnnnnnnnnnnnnnnnnnnnnnnnnnnnnnnnnnnnnnnnnnnnnnnnnnnnnnnnnnnnnnnnnnnnnnnnnnnnnnnnnnnnnnnnnnnnnnnnnnnnnnnnnnnnnnnnnnnnnnnnnnnnnnnnnnnnnnnnnnnnnnnnnnnnnnnnnnnnnnnnnnnnnnnnnnnnnnnnnnnnnnnnnnnnnnnnnnnnnnnnnnnnnnnnnnnnnnnnnnnnnnnnnnnnnnnnnnnnnnnnnnnnnnnnnnnnnnnnnnnnnnnnnnnnnnnnnnnnnnnnnnnnnnnnnnnnnnnnnnnnnnnnnnnnnnnnnnnnnnnnnnnnnnnnnnnnnnnnnnnnnnnnnnnnnnnnnnnnnnnnnnnnnnnnnnnnnnnnnnnnnnnnnnnnnnnnnnnnnnnnnnnnnnnnnnnnnnnnnnnnnnnnnnnnnnnnnnnnnnnnnnnnnnnnnnnnnnnnnnnnnnnnnnnnnnnnnnnnnnnnnnnnnnnnnnnnnnnnnnnnnnnnnnnnnnnnnnnnnnnnnnnnnnnnnnnnnnnnnnnnnnnnnnnnnnnnnnnnnnnnnnnnnnnnnnnnnnnnnnnnnnnnnnnnnnnnnnnnnnnnnnnnnnnnnnnnnnnnnnnnnnnnnnnnnnnnnnnnnnnnnnnnnnnnnnnnnnnnnnnnnnnnnnnnnnnnnnnnnnnnnnnnnnnnnnnnnnnnnnnnnnnnnnnnnnnnnnnnnnnnnnnnnnnnnnnnnnnnnnnnnnnnnnnnnnnnnnnnnnnnnnnnnnnnnnnnnnnnnnnnnnnnnnnnnnnnnnnnnnnnnnnnnnnnnnnnnnnnnnnnnnnnnnnnnnnnnnnnnnnnnnnnnnnnnnnnnnnnnnnnnnnnnnnnnnnnnnnnnnnnnnnnnnnnnnnnnnnnnnnnnnnnnnnnnnnnnnnnnnnnnnnnnnnnnnnnnnnnnnnnnnnnnnnnnnnnnnnnnnnnnnnnnnnnnnnnnnnnnnnnnnnnnnnnnnnnnnnnnnnnnnnnnnnnnnnnnnnnnnnnnnnnnnnnnnnnnnnnnnnnnnnnnnnnnnnnnnnnnnnnnnnnnnnnnnnnnnnnnnnnnnnnnnnnnnnnnnnnnnnnnnnnnnnnnnnnnnnnnnnnnnnnnnnnnnnnnnnnnnnnnnnnnnnnnnnnnnnnnnnnnnnnnnnnnnnnnnnnnnnnnnnnnnnnnnnnnnnnnnnnnnnnnnnnnnnnnnnnnnnnnnnnnnnnnnnnnnnnnnnnnnnnnnnnnnnnnnnnnnnnnnnnnnnnnnnnnnnnnnnnnnnnnnnnnnnnnnnnnnnnnnnnnnnnnnnnnnnnnnnnnnnnnnnnnnnnnnnnnnnnnnnnnnnnnnnnnnnnnnnnnnnnnnnnnnnnnnnnnnnnnnnnnnnnnnnnnnnnnnnnnnnnnnnnnnnnnnnnnnnnnnnnnnnnnnnnnnnnnnnnnnnnnnnnnnnnnnnnnnnnnnnnnnnnnnnnnnnnnnnnnnnnnnnnnnnnnnnnnnnnnnnnnnnnnnnnnnnnnnnnnnnnnnnnnnnnnnnnnnnnnnnnnnnnnnnnnnnnnnnnnnnnnnnnnnnnnnnnnnnnnnnnnnnnnnnnnnnnnnnnnnnnnnnnnnnnnnnnnnnnnnnnnnnnnnnnnnnnnnnnnnnnnnnnnnnnnnnnnnnnnnnnnnnnnnnnnnnnnnnnnnnnnnnnnnnnnnnnnnnnnnnnnnnnnnnnnnnnnnnnnnnnnnnnnnnnnnnnnnnnnnnnnnnnnnnnnnnnnnnnnnnnnnnnnnnnnnnnnnnnnnnnnnnnnnnnnnnnnnnnnnnnnnnnnnnnnnnnnnnnnnnnnnnnnnnnnnnnnnnnnnnnnnnnnnnnnnnnnnnnnnnnnnnnnnnnnnnnnnnnnnnnnnnnnnnnnnnnnnnnnnnnnnnnnnnnnnnnnnnnnnnnnnnnnnnnnnnnnnnnnnnnnnnnnnnnnnnnnnnnnnnnnnnnnnnnnnnnnnnnnnnnnnnnnnnnnnnnnnnnnnnnnnnnnnnnnnnnnnnnnnnnnnnnnnnnnnnnnnnnnnnnnnnnnnnnnnnnnnnnnnnnnnnnnnnnnnnnnnnnnnnnnnnnnnnnnnnnnnnnnnnnnnnnnnnnnnnnnnnnnnnnnnnnnnnnnnnnnnnnnnnnnnnnnnnnnnnnnnnnnnnnnnnnnnnnnnnnnnnnnnnnnnnnnnnnnnnnnnnnnnnnnnnnnnnnnnnnnnnnnnnnnnnnnnnnnnnnnnnnnnnnnnnnnnnnnnnnnnnnnnnnnnnnnnnnnnnnnnnnnnnnnnnnnnnnnnnnnnnnnnnnnnnnnnnnnnnnnnnnnnnnnnnnnnnnnnnnnnnnnnnnnnnnnnnnnnnnnnnnnnnnnnnnnnnnnnnnnnnnnnnnnnnnnnnnnnnnnnnnnnnnnnnnnnnnnnnnnnnnnnnnnnnnnnnnnnnnnnnnnnnnnnnnnnnnnnnnnnnnnnnnnnnnnnnnnnnnnnnnnnnnnnnnnnnnnnnnnnnnnnnnnnnnnnnnnnnnnnnnnnnnnnnnnnnnnnnnnnnnnnnnnnnnnnnnnnnnnnnnnnnnnnnnnnnnnnnnnnnnnnnnnnnnnnnnnnnnnnnnnnnnnnnnnnnnnnnnnnnnnnnnnnnnnnnnnnnnnnnnnnnnnnnnnnnnnnnnnnnnnnnnnnnnnnnnnnnnnnnnnnnnnnnnnnnnnnnnnnnnnnnnnnnnnnnnnnnnnnnnnnnnnnnnnnnnnnnnnnnnnnnnnnnnnnnnnnnnnnnnnnnnnnnnnnnnnnnnnnnnnnnnnnnnnnnnnnnnnnnnnnnnnnnnnnnnnnnnnnnnnnnnnnnnnnnnnnnnnnnnnnnnnnnnnnnnnnnnnnnnnnnnnnnnnnnnnnnnnnnnnnnnnnnnnnnnnnnnnnnnnnnnnnnnnnnnnnnnnnnnnnnnnnnnnnnnnnnnnnnnnnnnnnnnnnnnnnnnnnnnnnnnnnnnnnnnnnnnnnnnnnnnnnnnnnnnnnnnnnnnnnnnnnnnnnnnnnnnnnnnnnnnnnnnnnnnnnnnnnnnnnnnnnnnnnnnnnnnnnnnnnnnnnnnnnnnnnnnnnnnnnnnnnnnnnnnnnnnnnnnnnnnnnnnnnnnnnnnnnnnnnnnnnnnnnnnnnnnnnnnnnnnnnnnnnnnnnnnnnnnnnnnnnnnnnnnnnnnnnnnnnnnnnnnnnnnnnnnnnnnnnnnnnnnnnnnnnnnnnnnnnnnnnnnnnnnnnnnnnnnnnnnnnnnnnnnnnnnnnnnnnnnnnnnnnnnnnnnnnnnnnnnnnnnnnnnnnnnnnnnnnnnnnnnnnnnnnnnnnnnnnnnnnnnnnnnnnnnnnnnnnnnnnnnnnnnnnnnnnnnnnnnnnnnnnnnnnnnnnnnnnnnnnnnnnnnnnnnnnnnnnnnnnnnnnnnnnnnnnnnnnnnnnnnnnnnnnnnnnnnnnnnnnnnnnnnnnnnnnnnnnnnnnnnnnnnnnnnnnnnnnnnnnnnnnnnnnnnnnnnnnnnnnnnnnnnnnnnnnnnnnnnnnnnnnnnnnnnnnnnnnnnnnnnnnnnnnnnnnnnnnnnnnnnnnnnnnnnnnnnnnnnnnnnnnnnnnnnnnnnnnnnnnnnnnnnnnnnnnnnnnnnnnnnnnnnnnnnnnnnnnnnnnnnnnnnnnnnnnnnnnnnnnnnnnnnnnnnnnnnnnnnnnnnnnnnnnnnnnnnnnnnnnnnnnnnnnnnnnnnnnnnnnnnnnnnnnnnnnnnnnnnnnnnnnnnnnnnnnnnnnnnnnnnnnnnnnnnnnnnnnnnnnnnnnnnnnnnnnnnnnnnnnnnnnnnnnnnnnnnnnnnnnnnnnnnnnnnnnnnnnnnnnnnnnnnnnnnnnnnnnnnnnnnnnnnnnnnnnnnnnnnnnnnnnnnnnnnnnnnnnnnnnnnnnnnnnnnnnnnnnnnnnnnnnnnnnnnnnnnnnnnnnnnnnnnnnnnnnnnnnnnnnnnnnnnnnnnnnnnnnnnnnnnnnnnnnnnnnnnnnnnnnnnnnnnnnnnnnnnnnnnnnnnnnnnnnnnnnnnnnnnnnnnnnnnnnnnnnnnnnnnnnnnnnnnnnnnnnnnnnnnnnnnnnnnnnnnnnnnnnnnnnnnnnnnnnnnnnnnnnnnnnnnnnnnnnnnnnnnnnnnnnnnnnnnnnnnnnnnnnnnnnnnnnnnnnnnnnnnnnnnnnnnnnnnnnnnnnnnnnnnnnnnnnnnnnnnnnnnnnnnnnnnnnnnnnnnnnnnnnnnnnnnnnnnnnnnnnnnnnnnnnnnnnnnnnnnnnnnnnnnnnnnnnnnnnnnnnnnnnnnnnnnnnnnnnnnnnnnnnnnnnnnnnnnnnnnnnnnnnnnnnnnnnnnnnnnnnnnnnnnnnnnnnnnnnnnnnnnnnnnnnnnnnnnnnnnnnnnnnnnnnnnnnnnnnnnnnnnnnnnnnnnnnnnnnnnnnnnnnnnnnnnnnnnnnnnnnnnnnnnnnnnnnnnnnnnnnnnnnnnnnnnnnnnnnnnnnnnnnnnnnnnnnnnnnnnnnnnnnnnnnnnnnnnnnnnnnnnnnnnnnnnnnnnnnnnnnnnnnnnnnnnnnnnnnnnnnnnnnnnnnnnnnnnnnnnnnnnnnnnnnnnnnnnnnnnnnnnnnnnnnnnnnnnnnnnnnnnnnnnnnnnnnnnnnnnnnnnnnnnnnnnnnnnnnnnnnnnnnnnnnnnnnnnnnnnnnnnnnnnnnnnnnnnnnnnnnnnnnnnnnnnnnnnnnnnnnnnnnnnnnnnnnnnnnnnnnnnnnnnnnnnnnnnnnnnnnnnnnnnnnnnnnnnnnnnnnnnnnnnnnnnnnnnnnnnnnnnnnnnnnnnnnnnnnnnnnnnnnnnnnnnnnnnnnnnnnnnnnnnnnnnnnnnnnnnnnnnnnnnnnnnnnnnnnnnnnnnnnnnnnnnnnnnnnnnnnnnnnnnnnnnnnnnnnnnnnnnnnnnnnnnnnnnnnnnnnnnnnnnnnnnnnnnnnnnnnnnnnnnnnnnnnnnnnnnnnnnnnnnnnnnnnnnnnnnnnnnnnnnnnnnnnnnnnnnnnnnnnnnnnnnnnnnnnnnnnnnnnnnnnnnnnnnnnnnnnnnnnnnnnnnnnnnnnnnnnnnnnnnnnnnnnnnnnnnnnnnnnnnnnnnnnnnnnnnnnnnnnnnnnnnnnnnnnnnnnnnnnnnnnnnnnnnnnnnnnnnnnnnnnnnnnnnnnnnnnnnnnnnnnnnnnnnnnnnnnnnnnnnnnnnnnnnnnnnnnnnnnnnnnnnnnnnnnnnnnnnnnnnnnnnnnnnnnnnnnnnnnnnnnnnnnnnnnnnnnnnnnnnnnnnnnnnnnnnnnnnnnnnnnnnnnnnnnnnnnnnnnnnnnnnnnnnnnnnnnnnnnnnnnnnnnnnnnnnnnnnnnnnnnnnnnnnnnnnnnnnnnnnnnnnnnnnnnnnnnnnnnnnnnnnnnnnnnnnnnnnnnnnnnnnnnnnnnnnnnnnnnnnnnnnnnnnnnnnnnnnnnnnnnnnnnnnnnnnnnnnnnnnnnnnnnnnnnnnnnnnnnnnnnnnnnnnnnnnnnnnnnnnnnnnnnnnnnnnnnnnnnnnnnnnnnnnnnnnnnnnnnnnnnnnnnnnnnnnnnnnnnnnnnnnnnnnnnnnnnnnnnnnnnnnnnnnnnnnnnnnnnnnnnnnnnnnnnnnnnnnnnnnnnnnnnnnnnnnnnnnnnnnnnnnnnnnnnnnnnnnnnnnnnnnnnnnnnnnnnnnnnnnnnnnnnnnnnnnnnnnnnnnnnnnnnnnnnnnnnnnnnnnnnnnnnnnnnnnnnnnnnnnnnnnnnnnnnnnnnnnnnnnnnnnnnnnnnnnnnnnnnnnnnnnnnnnnnnnnnnnnnnnnnnnnnnnnnnnnnnnnnnnnnnnnnnnnnnnnnnnnnnnnnnnnnnnnnnnnnnnnnnnnnnnnnnnnnnnnnnnnnnnnnnnnnnnnnnnnnnnnnnnnnnnnnnnnnnnnnnnnnnnnnnnnnnnnnnnnnnnnnnnnnnnnnnnnnnnnnnnnnnnnnnnnnnnnnnnnnnnnnnnnnnnnnnnnnnnnnnnnnnnnnnnnnnnnnnnnnnnnnnnnnnnnnnnnnnnnnnnnnnnnnnnnnnnnnnnnnnnnnnnnnnnnnnnnnnnnnnnnnnnnnnnnnnnnnnnnnnnnnnnnnnnnnnnnnnnnnnnnnnnnnnnnnnnnnnnnnnnnnnnnnnnnnnnnnnnnnnnnnnnnnnnnnnnnnnnnnnnnnnnnnnnnnnnnnnnnnnnnnnnnnnnnnnnnnnnnnnnnnnnnnnnnnnnnnnnnnnnnnnnnnnnnnnnnnnnnnnnnnnnnnnnnnnnnnnnnnnnnnnnnnnnnnnnnnnnnnnnnnnnnnnnnnnnnnnnnnnnnnnnnnnnnnnnnnnnnnnnnnnnnnnnnnnnnnnnnnnnnnnnnnnnnnnnnnnnnnnnnnnnnnnnnnnnnnnnnnnnnnnnnnnnnnnnnnnnnnnnnnnnnnnnnnnnnnnnnnnnnnnnnnnnnnnnnnnnnnnnnnnnnnnnnnnnnnnnnnnnnnnnnnnnnnnnnnnnnnnnnnnnnnnnnnnnnnnnnnnnnnnnnnnnnnnnnnnnnnnnnnnnnnnnnnnnnnnnnnnnnnnnnnnnnnnnnnnnnnnnnnnnnnnnnnnnnnnnnnnnnnnnnnnnnnnnnnnnnnnnnnnnnnnnnnnnnnnnnnnnnnnnnnnnnnnnnnnnnnnnnnnnnnnnnnnnnnnnnnnnnnnnnnnnnnnnnnnnnnnnnnnnnnnnnnnnnnnnnnnnnnnnnnnnnnnnnnnnnnnnnnnnnnnnnnnnnnnnnnnnnnnnnnnnnnnnnnnnnnnnnnnnnnnnnnnnnnnnnnnnnnnnnnnnnnnnnnnnnnnnnnnnnnnnnnnnnnnnnnnnnnnnnnnnnnnnnnnnnnnnnnnnnnnnnnnnnnnnnnnnnnnnnnnnnnnnnnnnnnnnnnnnnnnnnnnnnnnnnnnnnnnnnnnnnnnnnnnnnnnnnnnnnnnnnnnnnnnnnnnnnnnnnnnnnnnnnnnnnnnnnnnnnnnnnnnnnnnnnnnnnnnnnnnnnnnnnnnnnnnnnnnnnnnnnnnnnnnnnnnnnnnnnnnnnnnnnnnnnnnnnnnnnnnnnnnnnnnnnnnnnnnnnnnnnnnnnnnnnnnnnnnnnnnnnnnnnnnnnnnnnnnnnnnnnnnnnnnnnnnnnnnnnnnnnnnnnnnnnnnnnnnnnnnnnnnnnnnnnnnnnnnnnnnnnnnnnnnnnnnnnnnnnnnnnnnnnnnnnnnnnnnnnnnnnnnnnnnnnnnnnnnnnnnnnnnnnnnnnnnnnnnnnnnnnnnnnnnnnnnnnnnnnnnnnnnnnnnnnnnnnnnnnnnnnnnnnnnnnnnnnnnnnnnnnnnnnnnnnnnnnnnnnnnnnnnnnnnnnnnnnnnnnnnnnnnnnnnnnnnnnnnnnnnnnnnnnnnnnnnnnnnnnnnnnnnnnnnnnnnnnnnnnnnnnnnnnnnnnnnnnnnnnnnnnnnnnnnnnnnnnnnnnnnnnnnnnnnnnnnnnnnnnnnnnnnnnnnnnnnnnnnnnnnnnnnnnnnnnnnnnnnnnnnnnnnnnnnnnnnnnnnnnnnnnnnnnnnnnnnnnnnnnnnnnnnnnnnnnnnnnnnnnnnnnnnnnnnnnnnnnnnnnnnnnnnnnnnnnnnnnnnnnnnnnnnnnnnnnnnnnnnnnnnnnnnnnnnnnnnnnnnnnnnnnnnnnnnnnnnnnnnnnnnnnnnnnnnnnnnnnnnnnnnnnnnnnnnnnnnnnnnnnnnnnnnnnnnnnnnnnnnnnnnnnnnnnnnnnnnnnnnnnnnnnnnnnnnnnnnnnnnnnnnnnnnnnnnnnnnnnnnnnnnnnnnnnnnnnnnnnnnnnnnnnnnnnnnnnnnnnnnnnnnnnnnnnnnnnnnnnnnnnnnnnnnnnnnnnnnnnnnnnnnnnnnnnnnnnnnnnnnnnnnnnnnnnnnnnnnnnnnnnnnnnnnnnnnnnnnnnnnnnnnnnnnnnnnnnnnnnnnnnnnnnnnnnnnnnnnnnnnnnnnnnnnnnnnnnnnnnnnnnnnnnnnnnnnnnnnnnnnnnnnnnnnnnnnnnnnnnnnnnnnnnnnnnnnnnnnnnnnnnnnnnnnnnnnnnnnnnnnnnnnnnnnnnnnnnnnnnnnnnnnnnnnnnnnnnnnnnnnnnnnnnnnnnnnnnnnnnnnnnnnnnnnnnnnnnnnnnnnnnnnnnnnnnnnnnnnnnnnnnnnnnnnnnnnnnnnnnnnnnnnnnnnnnnnnnnnnnnnnnnnnnnnnnnnnnnnnnnnnnnnnnnnnnnnnnnnnnnnnnnnnnnnnnnnnnnnnnnnnnnnnnnnnnnnnnnnnnnnnnnnnnnnnnnnnnnnnnnnnnnnnnnnnnnnnnnnnnnnnnnnnnnnnnnnnnnnnnnnnnnnnnnnnnnnnnnnnnnnnnnnnnnnnnnnnnnnnnnnnnnnnnnnnnnnnnnnnnnnnnnnnnnnnnnnnnnnnnnnnnnnnnnnnnnnnnnnnnnnnnnnnnnnnnnnnnnnnnnnnnnnnnnnnnnnnnnnnnnnnnnnnnnnnnnnnnnnnnnnnnnnnnnnnnnnnnnnnnnnnnnnnnnnnnnnnnnnnnnnnnnnnnnnnnnnnnnnnnnnnnnnnnnnnnnnnnnnnnnnnnnnnnnnnnnnnnnnnnnnnnnnnnnnnnnnnnnnnnnnnnnnnnnnnnnnnnnnnnnnnnnnnnnnnnnnnnnnnnnnnnnnnnnnnnnnnnnnnnnnnnnnnnnnnnnnnnnnnnnnnnnnnnnnnnnnnnnnnnnnnnnnnnnnnnnnnnnnnnnnnnnnnnnnnnnnnnnnnnnnnnnnnnnnnnnnnnnnnnnnnnnnnnnnnnnnnnnnnnnnnnnnnnnnnnnnnnnnnnnnnnnnnnnnnnnnnnnnnnnnnnnnnnnnnnnnnnnnnnnnnnnnnnnnnnnnnnnnnnnnnnnnnnnnnnnnnnnnnnnnnnnnnnnnnnnnnnnnnnnnnnnnnnnnnnnnnnnnnnnnnnnnnnnnnnnnnnnnnnnnnnnnnnnnnnnnnnnnnnnnnnnnnnnnnnnnnnnnnnnnnnnnnnnnnnnnnnnnnnnnnnnnnnnnnnnnnnnnnnnnnnnnnnnnnnnnnnnnnnnnnnnnnnnnnnnnnnnnnnnnnnnnnnnnnnnnnnnnnnnnnnnnnnnnnnnnnnnnnnnnnnnnnnnnnnnnnnnnnnnnnnnnnnnnnnnnnnnnnnnnnnnnnnnnnnnnnnnnnnnnnnnnnnnnnnnnnnnnnnnnnnnnnnnnnnnnnnnnnnnnnnnnnnnnnnnnnnnnnnnnnnnnnnnnnnnnnnnnnnnnnnnnnnnnnnnnnnnnnnnnnnnnnnnnnnnnnnnnnnnnnnnnnnnnnnnnnnnnnnnnnnnnnnnnnnnnnnnnnnnnnnnnnnnnnnnnnnnnnnnnnnnnnnnnnnnnnnnnnnnnnnnnnnnnnnnnnnnnnnnnnnnnnnnnnnnnnnnnnnnnnnnnnnnnnnnnnnnnnnnnnnnnnnnnnnnnnnnnnnnnnnnnnnnnnnnnnnnnnnnnnnnnnnnnnnnnnnnnnnnnnnnnnnnnnnnnnnnnnnnnnnnnnnnnnnnnnnnnnnnnnnnnnnnnnnnnnnnnnnnnnnnnnnnnnnnnnnnnnnnnnnnnnnnnnnnnnnnnnnnnnnnnnnnnnnnnnnnnnnnnnnnnnnnnnnnnnnnnnnnnnnnnnnnnnnnnnnnnnnnnnnnnnnnnnnnnnnnnnnnnnnnnnnnnnnnnnnnnnnnnnnnnnnnnnnnnnnnnnnnnnnnnnnnnnnnnnnnnnnnnnnnnnnnnnnnnnnnnnnnnnnnnnnnnnnnnnnnnnnnnnnnnnnnnnnnnnnnnnnnnnnnnnnnnnnnnnnnnnnnnnnnnnnnnnnnnnnnnnnnnnnnnnnnnnnnnnnnnnnnnnnnnnnnnnnnnnnnnnnnnnnnnnnnnnnnnnnnnnnnnnnnnnnnnnnnnnnnnnnnnnnnnnnnnnnnnnnnnnnnnnnnnnnnnnnnnnnnnnnnnnnnnnnnnnnnnnnnnnnnnnnnnnnnnnnnnnnnnnnnnnnnnnnnnnnnnnnnnnnnnnnnnnnnnnnnnnnnnnnnnnnnnnnnnnnnnnnnnnnnnnnnnnnnnnnnnnnnnnnnnnnnnnnnnnnnnnnnnnnnnnnnnnnnnnnnnnnnnnnnnnnnnnnnnnnnnnnnnnnnnnnnnnnnnnnnnnnnnnnnnnnnnnnnnnnnnnnnnnnnnnnnnnnnnnnnnnnnnnnnnnnnnnnnnnnnnnnnnnnnnnnnnnnnnnnnnnnnnnnnnnnnnnnnnnnnnnnnnnnnnnnnnnnnnnnnnnnnnnnnnnnnnnnnnnnnnnnnnnnnnnnnnnnnnnnnnnnnnnnnnnnnnnnnnnnnnnnnnnnnnnnnnnnnnnnnnnnnnnnnnnnnnnnnnnnnnnnnnnnnnnnnnnnnnnnnnnnnnnnnnnnnnnnnnnnnnnnnnnnnnnnnnnnnnnnnnnnnnnnnnnnnnnnnnnnnnnnnnnnnnnnnnnnnnnnnnnnnnnnnnnnnnnnnnnnnnnnnnnnnnnnnnnnnnnnnnnnnnnnnnnnnnnnnnnnnnnnnnnnnnnnnnnnnnnnnnnnnnnnnnnnnnnnnnnnnnnnnnnnnnnnnnnnnnnnnnnnnnnnnnnnnnnnnnnnnnnnnnnnnnnnnnnnnnnnnnnnnnnnnnnnnnnnnnnnnnnnnnnnnnnnnnnnnnnnnnnnnnnnnnnnnnnnnnnnnnnnnnnnnnnnnnnnnnnnnnnnnnnnnnnnnnnnnnnnnnnnnnnnnnnnnnnnnnnnnnnnnnnnnnnnnnnnnnnnnnnnnnnnnnnnnnnnnnnnnnnnnnnnnnnnnnnnnnnnnnnnnnnnnnnnnnnnnnnnnnnnnnnnnnnnnnnnnnnnnnnnnnnnnnnnnnnnnnnnnnnnnnnnnnnnnnnnnnnnnnnnnnnnnnnnnnnnnnnnnnnnnnnnnnnnnnnnnnnnnnnnnnnnnnnnnnnnnnnnnnnnnnnnnnnnnnnnnnnnnnnnnnnnnnnnnnnnnnnnnnnnnnnnnnnnnnnnnnnnnnnnnnnnnnnnnnnnnnnnnnnnnnnnnnnnnnnnnnnnnnnnnnnnnnnnnnnnnnnnnnnnnnnnnnnnnnnnnnnnnnnnnnnnnnnnnnnnnnnnnnnnnnnnnnnnnnnnnnnnnnnnnnnnnnnnnnnnnnnnnnnnnnnnnnnnnnnnnnnnnnnnnnnnnnnnnnnnnnnnnnnnnnnnnnnnnnnnnnnnnnnnnnnnnnnnnnnnnnnnnnnnnnnnnnnnnnnnnnnnnnnnnnnnnnnnnnnnnnnnnnnnnnnnnnnnnnnnnnnnnnnnnnnnnnnnnnnnnnnnnnnnnnnnnnnnnnnnnnnnnnnnnnnnnnnnnnnnnnnnnnnnnnnnnnnnnnnnnnnnnnnnnnnnnnnnnnnnnnnnnnnnnnnnnnnnnnnnnnnnnnnnnnnnnnnnnnnnnnnnnnnnnnnnnnnnnnnnnnnnnnnnnnnnnnnnnnnnnnnnnnnnnnnnnnnnnnnnnnnnnnnnnnnnnnnnnnnnnnnnnnnnnnnnnnnnnnnnnnnnnnnnnnnnnnnnnnnnnnnnnnnnnnnnnnnnnnnnnnnnnnnnnnnnnnnnnnnnnnnnnnnnnnnnnnnnnnnnnnnnnnnnnnnnnnnnnnnnnnnnnnnnnnnnnnnnnnnnnnnnnnnnnnnnnnnnnnnnnnnnnnnnnnnnnnnnnnnnnnnnnnnnnnnnnnnnnnnnnnnnnnnnnnnnnnnnnnnnnnnnnnnnnnnnnnnnnnnnnnnnnnnnnnnnnnnnnnnnnnnnnnnnnnnnnnnnnnnnnnnnnnnnnnnnnnnnnnnnnnnnnnnnnnnnnnnnnnnnnnnnnnnnnnnnnnnnnnnnnnnnnnnnnnnnnnnnnnnnnnnnnnnnnnnnnnnnnnnnnnnnnnnnnnnnnnnnnnnnnnnnnnnnnnnnnnnnnnnnnnnnnnnnnnnnnnnnnnnnnnnnnnnnnnnnnnnnnnnnnnnnnnnnnnnnnnnnnnnnnnnnnnnnnnnnnnnnnnnnnnnnnnnnnnnnnnnnnnnnnnnnnnnnnnnnnnnnnnnnnnnnnnnnnnnnnnnnnnnnnnnnnnnnnnnnnnnnnnnnnnnnnnnnnnnnnnnnnnnnnnnnnnnnnnnnnnnnnnnnnnnnnnnnnnnnnnnnnnnnnnnnnnnnnnnnnnnnnnnnnnnnnnnnnnnnnnnnnnnnnnnnnnnnnnnnnnnnnnnnnnnnnnnnnnnnnnnnnnnnnnnnnnnnnnnnnnnnnnnnnnnnnnnnnnnnnnnnnnnnnnnnnnnnnnnnnnnnnnnnnnnnnnnnnnnnnnnnnnnnnnnnnnnnnnnnnnnnnnnnnnnnnnnnnnnnnnnnnnnnnnnnnnnnnnnnnnnnnnnnnnnnnnnnnnnnnnnnnnnnnnnnnnnnnnnnnnnnnnnnnnnnnnnnnnnnnnnnnnnnnnnnnnnnnnnnnnnnnnnnnnnnnnnnnnnnnnnnnnnnnnnnnnnnnnnnnnnnnnnnnnnnnnnnnnnnnnnnnnnnnnnnnnnnnnnnnnnnnnnnnnnnnnnnnnnnnnnnnnnnnnnnnnnnnnnnnnnnnnnnnnnnnnnnnnnnnnnnnnnnnnnnnnnnnnnnnnnnnnnnnnnnnnnnnnnnnnnnnnnnnnnnnnnnnnnnnnnnnnnnnnnnnnnnnnnnnnnnnnnnnnnnnnnnnnnnnnnnnnnnnnnnnnnnnnnnnnnnnnnnnnnnnnnnnnnnnnnnnnnnnnnnnnnnnnnnnnnnnnnnnnnnnnnnnnnnnnnnnnnnnnnnnnnnnnnnnnnnnnnnnnnnnnnnnnnnnnnnnnnnnnnnnnnnnnnnnnnnnnnnnnnnnnnnnnnnnnnnnnnnnnnnnnnnnnnnnnnnnnnnnnnnnnnnnnnnnnnnnnnnnnnnnnnnnnnnnnnnnnnnnnnnnnnnnnnnnnnnnnnnnnnnnnnnnnnnnnnnnnnnnnnnnnnnnnnnnnnnnnnnnnnnnnnnnnnnnnnnnnnnnnnnnnnnnnnnnnnnnnnnnnnnnnnnnnnnnnnnnnnnnnnnnnnnnnnnnnnnnnnnnnnnnnnnnnnnnnnnnnnnnnnnnnnnnnnnnnnnnnnnnnnnnnnnnnnnnnnnnnnnnnnnnnnnnnnnnnnnnnnnnnnnnnnnnnnnnnnnnnnnnnnnnnnnnnnnnnnnnnnnnnnnnnnnnnnnnnnnnnnnnnnnnnnnnnnnnnnnnnnnnnnnnnnnnnnnnnnnnnnnnnnnnnnnnnnnnnnnnnnnnnnnnnnnnnnnnnnnnnnnnnnnnnnnnnnnnnnnnnnnnnnnnnnnnnnnnnnnnnnnnnnnnnnnnnnnnnnnnnnnnnnnnnnnnnnnnnnnnnnnnnnnnnnnnnnnnnnnnnnnnnnnnnnnnnnnnnnnnnnnnnnnnnnnnnnnnnnnnnnnnnnnnnnnnnnnnnnnnnnnnnnnnnnnnnnnnnnnnnnnnnnnnnnnnnnnnnnnnnnnnnnnnnnnnnnnnnnnnnnnnnnnnnnnnnnnnnnnnnnnnnnnnnnnnnnnnnnnnnnnnnnnnnnnnnnnnnnnnnnnnnnnnnnnnnnnnnnnnnnnnnnnnnnnnnnnnnnnnnnnnnnnnnnnnnnnnnnnnnnnnnnnnnnnnnnnnnnnnnnnnnnnnnnnnnnnnnnnnnnnnnnnnnnnnnnnnnnnnnnnnnnnnnnnnnnnnnnnnnnnnnnnnnnnnnnnnnnnnnnnnnnnnnnnnnnnnnnnnnnnnnnnnnnnnnnnnnnnnnnnnnnnnnnnnnnnnnnnnnnnnnnnnnnnnnnnnnnnnnnnnnnnnnnnnnnnnnnnnnnnnnnnnnnnnnnnnnnnnnnnnnnnnnnnnnnnnnnnnnnnnnnnnnnnnnnnnnnnnnnnnnnnnnnnnnnnnnnnnnnnnnnnnnnnnnnnnnnnnnnnnnnnnnnnnnnnnnnnnnnnnnnnnnnnnnnnnnnnnnnnnnnnnnnnnnnnnnnnnnnnnnnnnnnnnnnnnnnnnnnnnnnnnnnnnnnnnnnnnnnnnnnnnnnnnnnnnnnnnnnnnnnnnnnnnnnnnnnnnnnnnnnnnnnnnnnnnnnnnnnnnnnnnnnnnnnnnnnnnnnnnnnnnnnnnnnnnnnnnnnnnnnnnnnnnnnnnnnnnnnnnnnnnnnnnnnnnnnnnnnnnnnnnnnnnnnnnnnnnnnnnnnnnnnnnnnnnnnnnnnnnnnnnnnnnnnnnnnnnnnnnnnnnnnnnnnnnnnnnnnnnnnnnnnnnnnnnnnnnnnnnnnnnnnnnnnnnnnnnnnnnnnnnnnnnnnnnnnnnnnnnnnnnnnnnnnnnnnnnnnnnnnnnnnnnnnnnnnnnnnnnnnnnnnnnnnnnnnnnnnnnnnnnnnnnnnnnnnnnnnnnnnnnnnnnnnnnnnnnnnnnnnnnnnnnnnnnnnnnnnnnnnnnnnnnnnnnnnnnnnnnnnnnnnnnnnnnnnnnnnnnnnnnnnnnnnnnnnnnnnnnnnnnnnnnnnnnnnnnnnnnnnnnnnnnnnnnnnnnnnnnnnnnnnnnnnnnnnnnnnnnnnnnnnnnnnnnnnnnnnnnnnnnnnnnnnnnnnnnnnnnnnnnnnnnnnnnnnnnnnnnnnnnnnnnnnnnnnnnnnnnnnnnnnnnnnnnnnnnnnnnnnnnnnnnnnnnnnnnnnnnnnnnnnnnnnnnnnnnnnnnnnnnnnnnnnnnnnnnnnnnnnnnnnnnnnnnnnnnnnnnnnnnnnnnnnnnnnnnnnnnnnnnnnnnnnnnnnnnnnnnnnnnnnnnnnnnnnnnnnnnnnnnnnnnnnnnnnnnnnnnnnnnnnnnnnnnnnnnnnnnnnnnnnnnnnnnnnnnnnnnnnnnnnnnnnnnnnnnnnnnnnnnnnnnnnnnnnnnnnnnnnnnnnnnnnnnnnnnnnnnnnnnnnnnnnnnnnnnnnnnnnnnnnnnnnnnnnnnnnnnnnnnnnnnnnnnnnnnnnnnnnnnnnnnnnnnnnnnnnnnnnnnnnnnnnnnnnnnnnnnnnnnnnnnnnnnnnnnnnnnnnnnnnnnnnnnnnnnnnnnnnnnnnnnnnnnnnnnnnnnnnnnnnnnnnnnnnnnnnnnnnnnnnnnnnnnnnnnnnnnnnnnnnnnnnnnnnnnnnnnnnnnnnnnnnnnnnnnnnnnnnnnnnnnnnnnnnnnnnnnnnnnnnnnnnnnnnnnnnnnnnnnnnnnnnnnnnnnnnnnnnnnnnnnnnnnnnnnnnnnnnnnnnnnnnnnnnnnnnnnnnnnnnnnnnnnnnnnnnnnnnnnnnnnnnnnnnnnnnnnnnnnnnnnnnnnnnnnnnnnnnnnnnnnnnnnnnnnnnnnnnnnnnnnnnnnnnnnnnnnnnnnnnnnnnnnnnnnnnnnnnnnnnnnnnnnnnnnnnnnnnnnnnnnnnnnnnnnnnnnnnnnnnnnnnnnnnnnnnnnnnnnnnnnnnnnnnnnnnnnnnnnnnnnnnnnnnnnnnnnnnnnnnnnnnnnnnnnnnnnnnnnnnnnnnnnnnnnnnnnnnnnnnnnnnnnnnnnnnnnnnnnnnnnnnnnnnnnnnnnnnnnnnnnnnnnnnnnnnnnnnnnnnnnnnnnnnnnnnnnnnnnnnnnnnnnnnnnnnnnnnnnnnnnnnnnnnnnnnnnnnnnnnnnnnnnnnnnnnnnnnnnnnnnnnnnnnnnnnnnnnnnnnnnnnnnnnnnnnnnnnnnnnnnnnnnnnnnnnnnnnnnnnnnnnnnnnnnnnnnnnnnnnnnnnnnnnnnnnnnnnnnnnnnnnnnnnnnnnnnnnnnnnnnnnnnnnnnnnnnnnnnnnnnnnnnnnnnnnnnnnnnnnnnnnnnnnnnnnnnnnnnnnnnnnnnnnnnnnnnnnnnnnnnnnnnnnnnnnnnnnnnnnnnnnnnnnnnnnnnnnnnnnnnnnnnnnnnnnnnnnnnnnnnnnnnnnnnnnnnnnnnnnnnnnnnnnnnnnnnnnnnnnnnnnnnnnnnnnnnnnnnnnnnnnnnnnnnnnnnnnnnnnnnnnnnnnnnnnnnnnnnnnnnnnnnnnnnnnnnnnnnnnnnnnnnnnnnnnnnnnnnnnnnnnnnnnnnnnnnnnnnnnnnnnnnnnnnnnnnnnnnnnnnnnnnnnnnnnnnnnnnnnnnnnnnnnnnnnnnnnnnnnnnnnnnnnnnnnnnnnnnnnnnnnnnnnnnnnnnnnnnnnnnnnnnnnnnnnnnnnnnnnnnnnnnnnnnnnnnnnnnnnnnnnnnnnnnnnnnnnnnnnnnnnnnnnnnnnnnnnnnnnnnnnnnnnnnnnnnnnnnnnnnnnnnnnnnnnnnnnnnnnnnnnnnnnnnnnnnnnnnnnnnnnnnnnnnnnnnnnnnnnnnnnnnnnnnnnnnnnnnnnnnnnnnnnnnnnnnnnnnnnnnnnnnnnnnnnnnnnnnnnnnnnnnnnnnnnnnnnnnnnnnnnnnnnnnnnnnnnnnnnnnnnnnnnnnnnnnnnnnnnnnnnnnnnnnnnnnnnnnnnnnnnnnnnnnnnnnnnnnnnnnnnnnnnnnnnnnnnnnnnnnnnnnnnnnnnnnnnnnnnnnnnnnnnnnnnnnnnnnnnnnnnnnnnnnnnnnnnnnnnnnnnnnnnnnnnnnnnnnnnnnnnnnnnnnnnnnnnnnnnnnnnnnnnnnnnnnnnnnnnnnnnnnnnnnnnnnnnnnnnnnnnnnnnnnnnnnnnnnnnnnnnnnnnnnnnnnnnnnnnnnnnnnnnnnnnnnnnnnnnnnnnnnnnnnnnnnnnnnnnnnnnnnnnnnnnnnnnnnnnnnnnnnnnnnnnnnnnnnnnnnnnnnnnnnnnnnnnnnnnnnnnnnnnnnnnnnnnnnnnnnnnnnnnnnnnnnnnnnnnnnnnnnnnnnnnnnnnnnnnnnnnnnnnnnnnnnnnnnnnnnnnnnnnnnnnnnnnnnnnnnnnnnnnnnnnnnnnnnnnnnnnnnnnnnnnnnnnnnnnnnnnnnnnnnnnnnnnnnnnnnnnnnnnnnnnnnnnnnnnnnnnnnnnnnnnnnnnnnnnnnnnnnnnnnnnnnnnnnnnnnnnnnnnnnnnnnnnnnnnnnnnnnnnnnnnnnnnnnnnnnnnnnnnnnnnnnnnnnnnnnnnnnnnnnnnnnnnnnnnnnnnnnnnnnnnnnnnnnnnnnnnnnnnnnnnnnnnnnnnnnnnnnnnnnnnnnnnnnnnnnnnnnnnnnnnnnnnnnnnnnnnnnnnnnnnnnnnnnnnnnnnnnnnnnnnnnnnnnnnnnnnnnnnnnnnnnnnnnnnnnnnnnnnnnnnnnnnnnnnnnnnnnnnnnnnnnnnnnnnnnnnnnnnnnnnnnnnnnnnnnnnnnnnnnnnnnnnnnnnnnnnnnnnnnnnnnnnnnnnnnnnnnnnnnnnnnnnnnnnnnnnnnnnnnnnnnnnnnnnnnnnnnnnnnnnnnnnnnnnnnnnnnnnnnnnnnnnnnnnnnnnnnnnnnnnnnnnnnnnnnnnnnnnnnnnnnnnnnnnnnnnnnnnnnnnnnnnnnnnnnnnnnnnnnnnnnnnnnnnnnnnnnnnnnnnnnnnnnnnnnnnnnnnnnnnnnnnnnnnnnnnnnnnnnnnnnnnnnnnnnnnnnnnnnnnnnnnnnnnnnnnnnnnnnnnnnnnnnnnnnnnnnnnnnnnnnnnnnnnnnnnnnnnnnnnnnnnnnnnnnnnnnnnnnnnnnnnnnnnnnnnnnnnnnnnnnnnnnnnnnnnnnnnnnnnnnnnnnnnnnnnnnnnnnnnnnnnnnnnnnnnnnnnnnnnnnnnnnnnnnnnnnnnnnnnnnnnnnnnnnnnnnnnnnnnnnnnnnnnnnnnnnnnnnnnnnnnnnnnnnnnnnnnnnnnnnnnnnnnnnnnnnnnnnnnnnnnnnnnnnnnnnnnnnnnnnnnnnnnnnnnnnnnnnnnnnnnnnnnnnnnnnnnnnnnnnnnnnnnnnnnnnnnnnnnnnnnnnnnnnnnnnnnnnnnnnnnnnnnnnnnnnnnnnnnnnnnnnnnnnnnnnnnnnnnnnnnnnnnnnnnnnnnnnnnnnnnnnnnnnnnnnnnnnnnnnnnnnnnnnnnnnnnnnnnnnnnnnnnnnnnnnnnnnnnnnnnnnnnnnnnnnnnnnnnnnnnnnnnnnnnnnnnnnnnnnnnnnnnnnnnnnnnnnnnnnnnnnnnnnnnnnnnnnnnnnnnnnnnnnnnnnnnnnnnnnnnnnnnnnnnnnnnnnnnnnnnnnnnnnnnnnnnnnnnnnnnnnnnnnnnnnnnnnnnnnnnnnnnnnnnnnnnnnnnnnnnnnnnnnnnnnnnnnnnnnnnnnnnnnnnnnnnnnnnnnnnnnnnnnnnnnnnnnnnnnnnnnnnnnnnnnnnnnnnnnnnnnnnnnnnnnnnnnnnnnnnnnnnnnnnnnnnnnnnnnnnnnnnnnnnnnnnnnnnnnnnnnnnnnnnnnnnnnnnnnnnnnnnnnnnnnnnnnnnnnnnnnnnnnnnnnnnnnnnnnnnnnnnnnnnnnnnnnnnnnnnnnnnnnnnnnnnnnnnnnnnnnnnnnnnnnnnnnnnnnnnnnnnnnnnnnnnnnnnnnnnnnnnnnnnnnnnnnnnnnnnnnnnnnnnnnnnnnnnnnnnnnnnnnnnnnnnnnnnnnnnnnnnnnnnnnnnnnnnnnnnnnnnnnnnnnnnnnnnnnnnnnnnnnnnnnnnnnnnnnnnnnnnnnnnnnnnnnnnnnnnnnnnnnnnnnnnnnnnnnnnnnnnnnnnnnnnnnnnnnnnnnnnnnnnnnnnnnnnnnnnnnnnnnnnnnnnnnnnnnnnnnnnnnnnnnnnnnnnnnnnnnnnnnnnnnnnnnnnnnnnnnnnnnnnnnnnnnnnnnnnnnnnnnnnnnnnnnnnnnnnnnnnnnnnnnnnnnnnnnnnnnnnnnnnnnnnnnnnnnnnnnnnnnnnnnnnnnnnnnnnnnnnnnnnnnnnnnnnnnnnnnnnnnnnnnnnnnnnnnnnnnnnnnnnnnnnnnnnnnnnnnnnnnnnnnnnnnnnnnnnnnnnnnnnnnnnnnnnnnnnnnnnnnnnnnnnnnnnnnnnnnnnnnnnnnnnnnnnnnnnnnnnnnnnnnnnnnnnnnnnnnnnnnnnnnnnnnnnnnnnnnnnnnnnnnnnnnnnnnnnnnnnnnnnnnnnnnnnnnnnnnnnnnnnnnnnnnnnnnnnnnnnnnnnnnnnnnnnnnnnnnnnnnnnnnnnnnnnnnnnnnnnnnnnnnnnnnnnnnnnnnnnnnnnnnnnnnnnnnnnnnnnnnnnnnnnnnnnnnnnnnnnnnnnnnnnnnnnnnnnnnnnnnnnnnnnnnnnnnnnnnnnnnnnnnnnnnnnnnnnnnnnnnnnnnnnnnnnnnnnnnnnnnnnnnnnnnnnnnnnnnnnnnnnnnnnnnnnnnnnnnnnnnnnnnnnnnnnnnnnnnnnnnnnnnnnnnnnnnnnnnnnnnnnnnnnnnnnnnnnnnnnnnnnnnnnnnnnnnnnnnnnnnnnnnnnnnnnnnnnnnnnnnnnnnnnnnnnnnnnnnnnnnnnnnnnnnnnnnnnnnnnnnnnnnnnnnnnnnnnnnnnnnnnnnnnnnnnnnnnnnnnnnnnnnnnnnnnnnnnnnnnnnnnnnnnnnnnnnnnnnnnnnnnnnnnnnnnnnnnnnnnnnnnnnnnnnnnnnnnnnnnnnnnnnnnnnnnnnnnnnnnnnnnnnnnnnnnnnnnnnnnnnnnnnnnnnnnnnnnnnnnnnnnnnnnnnnnnnnnnnnnnnnnnnnnnnnnnnnnnnnnnnnnnnnnnnnnnnnnnnnnnnnnnnnnnnnnnnnnnnnnnnnnnnnnnnnnnnnnnnnnnnnnnnnnnnnnnnnnnnnnnnnnnnnnnnnnnnnnnnnnnnnnnnnnnnnnnnnnnnnnnnnnnnnnnnnnnnnnnnnnnnnnnnnnnnnnnnnnnnnnnnnnnnnnnnnnnnnnnnnnnnnnnnnnnnnnnnnnnnnnnnnnnnnnnnnnnnnnnnnnnnnnnnnnnnnnnnnnnnnnnnnnnnnnnnnnnnnnnnnnnnnnnnnnnnnnnnnnnnnnnnnnnnnnnnnnnnnnnnnnnnnnnnnnnnnnnnnnnnnnnnnnnnnnnnnnnnnnnnnnnnnnnnnnnnnnnnnnnnnnnnnnnnnnnnnnnnnnnnnnnnnnnnnnnnnnnnnnnnnnnnnnnnnnnnnnnnnnnnnnnnnnnnnnnnnnnnnnnnnnnnnnnnnnnnnnnnnnnnnnnnnnnnnnnnnnnnnnnnnnnnnnnnnnnnnnnnnnnnnnnnnnnnnnnnnnnnnnnnnnnnnnnnnnnnnnnnnnnnnnnnnnnnnnnnnnnnnnnnnnnnnnnnnnnnnnnnnnnnnnnnnnnnnnnnnnnnnnnnnnnnnnnnnnnnnnnnnnnnnnnnnnnnnnnnnnnnnnnnnnnnnnnnnnnnnnnnnnnnnnnnnnnnnnnnnnnnnnnnnnnnnnnnnnnnnnnnnnnnnnnnnnnnnnnnnnnnnnnnnnnnnnnnnnnnnnnnnnnnnnnnnnnnnnnnnnnnnnnnnnnnnnnnnnnnnnnnnnnnnnnnnnnnnnnnnnnnnnnnnnnnnnnnnnnnnnnnnnnnnnnnnnnnnnnnnnnnnnnnnnnnnnnnnnnnnnnnnnnnnnnnnnnnnnnnnnnnnnnnnnnnnnnnnnnnnnnnnnnnnnnnnnnnnnnnnnnnnnnnnnnnnnnnnnnnnnnnnnnnnnnnnnnnnnnnnnnnnnnnnnnnnnnnnnnnnnnnnnnnnnnnnnnnnnnnnnnnnnnnnnnnnnnnnnnnnnnnnnnnnnnnnnnnnnnnnnnnnnnnnnnnnnnnnnnnnnnnnnnnnnnnnnnnnnnnnnnnnnnnnnnnnnnnnnnnnnnnnnnnnnnnnnnnnnnnnnnnnnnnnnnnnnnnnnnnnnnnnnnnnnnnnnnnnnnnnnnnnnnnnnnnnnnnnnnnnnnnnnnnnnnnnnnnnnnnnnnnnnnnnnnnnnnnnnnnnnnnnnnnnnnnnnnnnnnnnnnnnnnnnnnnnnnnnnnnnnnnnnnnnnnnnnnnnnnnnnnnnnnnnnnnnnnnnnnnnnnnnnnnnnnnnnnnnnnnnnnnnnnnnnnnnnnnnnnnnnnnnnnnnnnnnnnnnnnnnnnnnnnnnnnnnnnnnnnnnnnnnnnnnnnnnnnnnnnnnnnnnnnnnnnnnnnnnnnnnnnnnnnnnnnnnnnnnnnnnnnnnnnnnnnnnnnnnnnnnnnnnnnnnnnnnnnnnnnnnnnnnnnnnnnnnnnnnnnnnnnnnnnnnnnnnnnnnnnnnnnnnnnnnnnnnnnnnnnnnnnnnnnnnnnnnnnnnnnnnnnnnnnnnnnnnnnnnnnnnnnnnnnnnnnnnnnnnnnnnnnnnnnnnnnnnnnnnnnnnnnnnnnnnnnnnnnnnnnnnnnnnnnnnnnnnnnnnnnnnnnnnnnnnnnnnnnnnnnnnnnnnnnnnnnnnnnnnnnnnnnnnnnnnnnnnnnnnnnnnnnnnnnnnnnnnnnnnnnnnnnnnnnnnnnnnnnnnnnnnnnnnnnnnnnnnnnnnnnnnnnnnnnnnnnnnnnnnnnnnnnnnnnnnnnnnnnnnnnnnnnnnnnnnnnnnnnnnnnnnnnnnnnnnnnnnnnnnnnnnnnnnnnnnnnnnnnnnnnnnnnnnnnnnnnnnnnnnnnnnnnnnnnnnnnnnnnnnnnnnnnnnnnnnnnnnnnnnnnnnnnnnnnnnnnnnnnnnnnnnnnnnnnnnnnnnnnnnnnnnnnnnnnnnnnnnnnnnnnnnnnnnnnnnnnnnnnnnnnnnnnnnnnnnnnnnnnnnnnnnnnnnnnnnnnnnnnnnnnnnnnnnnnnnnnnnnnnnnnnnnnnnnnnnnnnnnnnnnnnnnnnnnnnnnnnnnnnnnnnnnnnnnnnnnnnnnnnnnnnnnnnnnnnnnnnnnnnnnnnnnnnnnnnnnnnnnnnnnnnnnnnnnnnnnnnnnnnnnnnnnnnnnnnnnnnnnnnnnnnnnnnnnnnnnnnnnnnnnnnnnnnnnnnnnnnnnnnnnnnnnnnnnnnnnnnnnnnnnnnnnnnnnnnnnnnnnnnnnnnnnnnnnnnnnnnnnnnnnnnnnnnnnnnnnnnnnnnnnnnnnnnnnnnnnnnnnnnnnnnnnnnnnnnnnnnnnnnnnnnnnnnnnnnnnnnnnnnnnnnnnnnnnnnnnnnnnnnnnnnnnnnnnnnnnnnnnnnnnnnnnnnnnnnnnnnnnnnnnnnnnnnnnnnnnnnnnnnnnnnnnnnnnnnnnnnnnnnnnnnnnnnnnnnnnnnnnnnnnnnnnnnnnnnnnnnnnnnnnnnnnnnnnnnnnnnnnnnnnnnnnnnnnnnnnnnnnnnnnnnnnnnnnnnnnnnnnnnnnnnnnnnnnnnnnnnnnnnnnnnnnnnnnnnnnnnnnnnnnnnnnnnnnnnnnnnnnnnnnnnnnnnnnnnnnnnnnnnnnnnnnnnnnnnnnnnnnnnnnnnnnnnnnnnnnnnnnnnnnnnnnnnnnnnnnnnnnnnnnnnnnnnnnnnnnnnnnnnnnnnnnnnnnnnnnnnnnnnnnnnnnnnnnnnnnnnnnnnnnnnnnnnnnnnnnnnnnnnnnnnnnnnnnnnnnnnnnnnnnnnnnnnnnnnnnnnnnnnnnnnnnnnnnnnnnnnnnnnnnnnnnnnnnnnnnnnnnnnnnnnnnnnnnnnnnnnnnnnnnnnnnnnnnnnnnnnnnnnnnnnnnnnnnnnnnnnnnnnnnnnnnnnnnnnnnnnnnnnnnnnnnnnnnnnnnnnnnnnnnnnnnnnnnnnnnnnnnnnnnnnnnnnnnnnnnnnnnnnnnnnnnnnnnnnnnnnnnnnnnnnnnnnnnnnnnnnnnnnnnnnnnnnnnnnnnnnnnnnnnnnnnnnnnnnnnnnnnnnnnnnnnnnnnnnnnnnnnnnnnnnnnnnnnnnnnnnnnnnnnnnnnnnnnnnnnnnnnnnnnnnnnnnnnnnnnnnnnnnnnnnnnnnnnnnnnnnnnnnnnnnnnnnnnnnnnnnnnnnnnnnnnnnnnnnnnnnnnnnnnnnnnnnnnnnnnnnnnnnnnnnnnnnnnnnnnnnnnnnnnnnnnnnnnnnnnnnnnnnnnnnnnnnnnnnnnnnnnnnnnnnnnnnnnnnnnnnnnnnnnnnnnnnnnnnnnnnnnnnnnnnnnnnnnnnnnnnnnnnnnnnnnnnnnnnnnnnnnnnnnnnnnnnnnnnnnnnnnnnnnnnnnnnnnnnnnnnnnnnnnnnnnnnnnnnnnnnnnnnnnnnnnnnnnnnnnnnnnnnnnnnnnnnnnnnnnnnnnnnnnnnnnnnnnnnnnnnnnnnnnnnnnnnnnnnnnnnnnnnnnnnnnnnnnnnnnnnnnnnnnnnnnnnnnnnnnnnnnnnnnnnnnnnnnnnnnnnnnnnnnnnnnnnnnnnnnnnnnnnnnnnnnnnnnnnnnnnnnnnnnnnnnnnnnnnnnnnnnnnnnnnnnnnnnnnnnnnnnnnnnnnnnnnnnnnnnnnnnnnnnnnnnnnnnnnnnnnnnnnnnnnnnnnnnnnnnnnnnnnnnnnnnnnnnnnnnnnnnnnnnnnnnnnnnnnnnnnnnnnnnnnnnnnnnnnnnnnnnnnnnnnnnnnnnnnnnnnnnnnnnnnnnnnnnnnnnnnnnnnnnnnnnnnnnnnnnnnnnnnnnnnnnnnnnnnnnnnnnnnnnnnnnnnnnnnnnnnnnnnnnnnnnnnnnnnnnnnnnnnnnnnnnnnnnnnnnnnnnnnnnnnnnnnnnnnnnnnnnnnnnnnnnnnnnnnnnnnnnnnnnnnnnnnnnnnnnnnnnnnnnnnnnnnnnnnnnnnnnnnnnnnnnnnnnnnnnnnnnnnnnnnnnnnnnnnnnnnnnnnnnnnnnnnnnnnnnnnnnnnnnnnnnnnnnnnnnnnnnnnnnnnnnnnnnnnnnnnnnnnnnnnnnnnnnnnnnnnnnnnnnnnnnnnnnnnnnnnnnnnnnnnnnnnnnnnnnnnnnnnnnnnnnnnnnnnnnnnnnnnnnnnnnnnnnnnnnnnnnnnnnnnnnnnnnnnnnnnnnnnnnnnnnnnnnnnnnnnnnnnnnnnnnnnnnnnnnnnnnnnnnnnnnnnnnnnnnnnnnnnnnnnnnnnnnnnnnnnnnnnnnnnnnnnnnnnnnnnnnnnnnnnnnnnnnnnnnnnnnnnnnnnnnnnnnnnnnnnnnnnnnnnnnnnnnnnnnnnnnnnnnnnnnnnnnnnnnnnnnnnnnnnnnnnnnnnnnnnnnnnnnnnnnnnnnnnnnnnnnnnnnnnnnnnnnnnnnnnnnnnnnnnnnnnnnnnnnnnnnnnnnnnnnnnnnnnnnnnnnnnnnnnnnnnnnnnnnnnnnnnnnnnnnnnnnnnnnnnnnnnnnnnnnnnnnnnnnnnnnnnnnnnnnnnnnnnnnnnnnnnnnnnnnnnnnnnnnnnnnnnnnnnnnnnnnnnnnnnnnnnnnnnnnnnnnnnnnnnnnnnnnnnnnnnnnnnnnnnnnnnnnnnnnnnnnnnnnnnnnnnnnnnnnnnnnnnnnnnnnnnnnnnnnnnnnnnnnnnnnnnnnnnnnnnnnnnnnnnnnnnnnnnnnnnnnnnnnnnnnnnnnnnnnnnnnnnnnnnnnnnnnnnnnnnnnnnnnnnnnnnnnnnnnnnnnnnnnnnnnnnnnnnnnnnnnnnnnnnnnnnnnnnnnnnnnnnnnnnnnnnnnnnnnnnnnnnnnnnnnnnnnnnnnnnnnnnnnnnnnnnnnnnnnnnnnnnnnnnnnnnnnnnnnnnnnnnnnnnnnnnnnnnnnnnnnnnnnnnnnnnnnnnnnnnnnnnnnnnnnnnnnnnnnnnnnnnnnnnnnnnnnnnnnnnnnnnnnnnnnnnnnnnnnnnnnnnnnnnnnnnnnnnnnnnnnnnnnnnnnnnnnnnnnnnnnnnnnnnnnnnnnnnnnnnnnnnnnnnnnnnnnnnnnnnnnnnnnnnnnnnnnnnnnnnnnnnnnnnnnnnnnnnnnnnnnnnnnnnnnnnnnnnnnnnnnnnnnnnnnnnnnnnnnnnnnnnnnnnnnnnnnnnnnnnnnnnnnnnnnnnnnnnnnnnnnnnnnnnnnnnnnnnnnnnnnnnnnnnnnnnnnnnnnnnnnnnnnnnnnnnnnnnnnnnnnnnnnnnnnnnnnnnnnnnnnnnnnnnnnnnnnnnnnnnnnnnnnnnnnnnnnnnnnnnnnnnnnnnnnnnnnnnnnnnnnnnnnnnnnnnnnnnnnnnnnnnnnnnnnnnnnnnnnnnnnnnnnnnnnnnnnnnnnnnnnnnnnnnnnnnnnnnnnnnnnnnnnnnnnnnnnnnnnnnnnnnnnnnnnnnnnnnnnnnnnnnnnnnnnnnnnnnnnnnnnnnnnnnnnnnnnnnnnnnnnnnnnnnnnnnnnnnnnnnnnnnnnnnnnnnnnnnnnnnnnnnnnnnnnnnnnnnnnnnnnnnnnnnnnnnnnnnnnnnnnnnnnnnnnnnnnnnnnnnnnnnnnnnnnnnnnnnnnnnnnnnnnnnnnnnnnnnnnnnnnnnnnnnnnnnnnnnnnnnnnnnnnnnnnnnnnnnnnnnnnnnnnnnnnnnnnnnnnnnnnnnnnnnnnnnnnnnnnnnnnnnnnnnnnnnnnnnnnnnnnnnnnnnnnnnnnnnnnnnnnnnnnnnnnnnnnnnnnnnnnnnnnnnnnnnnnnnnnnnnnnnnnnnnnnnnnnnnnnnnnnnnnnnnnnnnnnnnnnnnnnnnnnnnnnnnnnnnnnnnnnnnnnnnnnnnnnnnnnnnnnnnnnnnnnnnnnnnnnnnnnnnnnnnnnnnnnnnnnnnnnnnnnnnnnnnnnnnnnnnnnnnnnnnnnnnnnnnnnnnnnnnnnnnnnnnnnnnnnnnnnnnnnnnnnnnnnnnnnnnnnnnnnnnnnnnnnnnnnnnnnnnnnnnnnnnnnnnnnnnnnnnnnnnnnnnnnnnnnnnnnnnnnnnnnnnnnnnnnnnnnnnnnnnnnnnnnnnnnnnnnnnnnnnnnnnnnnnnnnnnnnnnnnnnnnnnnnnnnnnnnnnnnnnnnnnnnnnnnnnnnnnnnnnnnnnnnnnnnnnnnnnnnnnnnnnnnnnnnnnnnnnnnnnnnnnnnnnnnnnnnnnnnnnnnnnnnnnnnnnnnnnnnnnnnnnnnnnnnnnnnnnnnnnnnnnnnnnnnnnnnnnnnnnnnnnnnnnnnnnnnnnnnnnnnnnnnnnnnnnnnnnnnnnnnnnnnnnnnnnnnnnnnnnnnnnnnnnnnnnnnnnnnnnnnnnnnnnnnnnnnnnnnnnnnnnnnnnnnnnnnnnnnnnnnnnnnnnnnnnnnnnnnnnnnnnnnnnnnnnnnnnnnnnnnnnnnnnnnnnnnnnnnnnnnnnnnnnnnnnnnnnnnnnnnnnnnnnnnnnnnnnnnnnnnnnnnnnnnnnnnnnnnnnnnnnnnnnnnnnnnnnnnnnnnnnnnnnnnnnnnnnnnnnnnnnnnnnnnnnnnnnnnnnnnnnnnnnnnnnnnnnnnnnnnnnnnnnnnnnnnnnnnnnnnnnnnnnnnnnnnnnnnnnnnnnnnnnnnnnnnnnnnnnnnnnnnnnnnnnnnnnnnnnnnnnnnnnnnnnnnnnnnnnnnnnnnnnnnnnnnnnnnnnnnnnnnnnnnnnnnnnnnnnnnnnnnnnnnnnnnnnnnnnnnnnnnnnnnnnnnnnnnnnnnnnnnnnnnnnnnnnnnnnnnnnnnnnnnnnnnnnnnnnnnnnnnnnnnnnnnnnnnnnnnnnnnnnnnnnnnnnnnnnnnnnnnnnnnnnnnnnnnnnnnnnnnnnnnnnnnnnnnnnnnnnnnnnnnnnnnnnnnnnnnnnnnnnnnnnnnnnnnnnnnnnnnnnnnnnnnnnnnnnnnnnnnnnnnnnnnnnnnnnnnnnnnnnnnnnnnnnnnnnnnnnnnnnnnnnnnnnnnnnnnnnnnnnnnnnnnnnnnnnnnnnnnnnnnnnnnnnnnnnnnnnnnnnnnnnnnnnnnnnnnnnnnnnnnnnnnnnnnnnnnnnnnnnnnnnnnnnnnnnnnnnnnnnnnnnnnnnnnnnnnnnnnnnnnnnnnnnnnnnnnnnnnnnnnnnnnnnnnnnnnnnnnnnnnnnnnnnnnnnnnnnnnnnnnnnnnnnnnnnnnnnnnnnnnnnnnnnnnnnnnnnnnnnnnnnnnnnnnnnnnnnnnnnnnnnnnnnnnnnnnnnnnnnnnnnnnnnnnnnnnnnnnnnnnnnnnnnnnnnnnnnnnnnnnnnnnnnnnnnnnnnnnnnnnnnnnnnnnnnnnnnnnnnnnnnnnnnnnnnnnnnnnnnnnnnnnnnnnnnnnnnnnnnnnnnnnnnnnnnnnnnnnnnnnnnnnnnnnnnnnnnnnnnnnnnnnnnnnnnnnnnnnnnnnnnnnnnnnnnnnnnnnnnnnnnnnnnnnnnnnnnnnnnnnnnnnnnnnnnnnnnnnnnnnnnnnnnnnnnnnnnnnnnnnnnnnnnnnnnnnnnnnnnnnnnnnnnnnnnnnnnnnnnnnnnnnnnnnnnnnnnnnnnnnnnnnnnnnnnnnnnnnnnnnnnnnnnnnnnnnnnnnnnnnnnnnnnnnnnnnnnnnnnnnnnnnnnnnnnnnnnnnnnnnnnnnnnnnnnnnnnnnnnnnnnnnnnnnnnnnnnnnnnnnnnnnnnnnnnnnnnnnnnnnnnnnnnnnnnnnnnnnnnnnnnnnnnnnnnnnnnnnnnnnnnnnnnnnnnnnnnnnnnnnnnnnnnnnnnnnnnnnnnnnnnnnnnnnnnnnnnnnnnnnnnnnnnnnnnnnnnnnnnnnnnnnnnnnnnnnnnnnnnnnnnnnnnnnnnnnnnnnnnnnnnnnnnnnnnnnnnnnnnnnnnnnnnnnnnnnnnnnnnnnnnnnnnnnnnnnnnnnnnnnnnnnnnnnnnnnnnnnnnnnnnnnnnnnnnnnnnnnnnnnnnnnnnnnnnnnnnnnnnnnnnnnnnnnnnnnnnnnnnnnnnnnnnnnnnnnnnnnnnnnnnnnnnnnnnnnnnnnnnnnnnnnnnnnnnnnnnnnnnnnnnnnnnnnnnnnnnnnnnnnnnnnnnnnnnnnnnnnnnnnnnnnnnnnnnnnnnnnnnnnnnnnnnnnnnnnnnnnnnnnnnnnnnnnnnnnnnnnnnnnnnnnnnnnnnnnnnnnnnnnnnnnnnnnnnnnnnnnnnnnnnnnnnnnnnnnnnnnnnnnnnnnnnnnnnnnnnnnnnnnnnnnnnnnnnnnnnnnnnnnnnnnnnnnnnnnnnnnnnnnnnnnnnnnnnnnnnnnnnnnnnnnnnnnnnnnnnnnnnnnnnnnnnnnnnnnnnnnnnnnnnnnnnnnnnnnnnnnnnnnnnnnnnnnnnnnnnnnnnnnnnnnnnnnnnnnnnnnnnnnnnnnnnnnnnnnnnnnnnnnnnnnnnnnnnnnnnnnnnnnnnnnnnnnnnnnnnnnnnnnnnnnnnnnnnnnnnnnnnnnnnnnnnnnnnnnnnnnnnnnnnnnnnnnnnnnnnnnnnnnnnnnnnnnnnnnnnnnnnnnnnnnnnnnnnnnnnnnnnnnnnnnnnnnnnnnnnnnnnnnnnnnnnnnnnnnnnnnnnnnnnnnnnnnnnnnnnnnnnnnnnnnnnnnnnnnnnnnnnnnnnnnnnnnnnnnnnnnnnnnnnnnnnnnnnnnnnnnnnnnnnnnnnnnnnnnnnnnnnnnnnnnnnnnnnnnnnnnnnnnnnnnnnnnnnnnnnnnnnnnnnnnnnnnnnnnnnnnnnnnnnnnnnnnnnnnnnnnnnnnnnnnnnnnnnnnnnnnnnnnnnnnnnnnnnnnnnnnnnnnnnnnnnnnnnnnnnnnnnnnnnnnnnnnnnnnnnnnnnnnnnnnnnnnnnnnnnnnnnnnnnnnnnnnnnnnnnnnnnnnnnnnnnnnnnnnnnnnnnnnnnnnnnnnnnnnnnnnnnnnnnnnnnnnnnnnnnnnnnnnnnnnnnnnnnnnnnnnnnnnnnnnnnnnnnnnnnnnnnnnnnnnnnnnnnnnnnnnnnnnnnnnnnnnnnnnnnnnnnnnnnnnnnnnnnnnnnnnnnnnnnnnnnnnnnnnnnnnnnnnnnnnnnnnnnnnnnnnnnnnnnnnnnnnnnnnnnnnnnnnnnnnnnnnnnnnnnnnnnnnnnnnnnnnnnnnnnnnnnnnnnnnnnnnnnnnnnnnnnnnnnnnnnnnnnnnnnnnnnnnnnnnnnnnnnnnnnnnnnnnnnnnnnnnnnnnnnnnnnnnnnnnnnnnnnnnnnnnnnnnnnnnnnnnnnnnnnnnnnnnnnnnnnnnnnnnnnnnnnnnnnnnnnnnnnnnnnnnnnnnnnnnnnnnnnnnnnnnnnnnnnnnnnnnnnnnnnnnnnnnnnnnnnnnnnnnnnnnnnnnnnnnnnnnnnnnnnnnnnnnnnnnnnnnnnnnnnnnnnnnnnnnnnnnnnnnnnnnnnnnnnnnnnnnnnnnnnnnnnnnnnnnnnnnnnnnnnnnnnnnnnnnnnnnnnnnnnnnnnnnnnnnnnnnnnnnnnnnnnnnnnnnnnnnnnnnnnnnnnnnnnnnnnnnnnnnnnnnnnnnnnnnnnnnnnnnnnnnnnnnnnnnnnnnnnnnnnnnnnnnnnnnnnnnnnnnnnnnnnnnnnnnnnnnnnnnnnnnnnnnnnnnnnnnnnnnnnnnnnnnnnnnnnnnnnnnnnnnnnnnnnnnnnnnnnnnnnnnnnnnnnnnnnnnnnnnnnnnnnnnnnnnnnnnnnnnnnnnnnnnnnnnnnnnnnnnnnnnnnnnnnnnnnnnnnnnnnnnnnnnnnnnnnnnnnnnnnnnnnnnnnnnnnnnnnnnnnnnnnnnnnnnnnnnnnnnnnnnnnnnnnnnnnnnnnnnnnnnnnnnnnnnnnnnnnnnnnnnnnnnnnnnnnnnnnnnnnnnnnnnnnnnnnnnnnnnnnnnnnnnnnnnnnnnnnnnnnnnnnnnnnnnnnnnnnnnnnnnnnnnnnnnnnnnnnnnnnnnnnnnnnnnnnnnnnnnnnnnnnnnnnnnnnnnnnnnnnnnnnnnnnnnnnnnnnnnnnnnnnnnnnnnnnnnnnnnnnnnnnnnnnnnnnnnnnnnnnnnnnnnnnnnnnnnnnnnnnnnnnnnnnnnnnnnnnnnnnnnnnnnnnnnnnnnnnnnnnnnnnnnnnnnnnnnnnnnnnnnnnnnnnnnnnnnnnnnnnnnnnnnnnnnnnnnnnnnnnnnnnnnnnnnnnnnnnnnnnnnnnnnnnnnnnnnnnnnnnnnnnnnnnnnnnnnnnnnnnnnnnnnnnnnnnnnnnnnnnnnnnnnnnnnnnnnnnnnnnnnnnnnnnnnnnnnnnnnnnnnnnnnnnnnnnnnnnnnnnnnnnnnnnnnnnnnnnnnnnnnnnnnnnnnnnnnnnnnnnnnnnnnnnnnnnnnnnnnnnnnnnnnnnnnnnnnnnnnnnnnnnnnnnnnnnnnnnnnnnnnnnnnnnnnnnnnnnnnnnnnnnnnnnnnnnnnnnnnnnnnnnnnnnnnnnnnnnnnnnnnnnnnnnnnnnnnnnnnnnnnnnnnnnnnnnnnnnnnnnnnnnnnnnnnnnnnnnnnnnnnnnnnnnnnnnnnnnnnnnnnnnnnnnnnnnnnnnnnnnnnnnnnnnnnnnnnnnnnnnnnnnnnnnnnnnnnnnnnnnnnnnnnnnnnnnnnnnnnnnnnnnnnnnnnnnnnnnnnnnnnnnnnnnnnnnnnnnnnnnnnnnnnnnnnnnnnnnnnnnnnnnnnnnnnnnnnnnnnnnnnnnnnnnnnnnnnnnnnnnnnnnnnnnnnnnnnnnnnnnnnnnnnnnnnnnnnnnnnnnnnnnnnnnnnnnnnnnnnnnnnnnnnnnnnnnnnnnnnnnnnnnnnnnnnnnnnnnnnnnnnnnnnnnnnnnnnnnnnnnnnnnnnnnnnnnnnnnnnnnnnnnnnnnnnnnnnnnnnnnnnnnnnnnnnnnnnnnnnnnnnnnnnnnnnnnnnnnnnnnnnnnnnnnnnnnnnnnnnnnnnnnnnnnnnnnnnnnnnnnnnnnnnnnnnnnnnnnnnnnnnnnnnnnnnnnnnnnnnnnnnnnnnnnnnnnnnnnnnnnnnnnnnnnnnnnnnnnnnnnnnnnnnnnnnnnnnnnnnnnnnnnnnnnnnnnnnnnnnnnnnnnnnnnnnnnnnnnnnnnnnnnnnnnnnnnnnnnnnnnnnnnnnnnnnnnnnnnnnnnnnnnnnnnnnnnnnnnnnnnnnnnnnnnnnnnnnnnnnnnnnnnnnnnnnnnnnnnnnnnnnnnnnnnnnnnnnnnnnnnnnnnnnnnnnnnnnnnnnnnnnnnnnnnnnnnnnnnnnnnnnnnnnnnnnnnnnnnnnnnnnnnnnnnnnnnnnnnnnnnnnnnnnnnnnnnnnnnnnnnnnnnnnnnnnnnnnnnnnnnnnnnnnnnnnnnnnnnnnnnnnnnnnnnnnnnnnnnnnnnnnnnnnnnnnnnnnnnnnnnnnnnnnnnnnnnnnnnnnnnnnnnnnnnnnnnnnnnnnnnnnnnnnnnnnnnnnnnnnnnnnnnnnnnnnnnnnnnnnnnnnnnnnnnnnnnnnnnnnnnnnnnnnnnnnnnnnnnnnnnnnnnnnnnnnnnnnnnnnnnnnnnnnnnnnnnnnnnnnnnnnnnnnnnnnnnnnnnnnnnnnnnnnnnnnnnnnnnnnnnnnnnnnnnnnnnnnnnnnnnnnnnnnnnnnnnnnnnnnnnnnnnnnnnnnnnnnnnnnnnnnnnnnnnnnnnnnnnnnnnnnnnnnnnnnnnnnnnnnnnnnnnnnnnnnnnnnnnnnnnnnnnnnnnnnnnnnnnnnnnnnnnnnnnnnnnnnnnnnnnnnnnnnnnnnnnnnnnnnnnnnnnnnnnnnnnnnnnnnnnnnnnnnnnnnnnnnnnnnnnnnnnnnnnnnnnnnnnnnnnnnnnnnnnnnnnnnnnnnnnnnnnnnnnnnnnnnnnnnnnnnnnnnnnnnnnnnnnnnnnnnnnnnnnnnnnnnnnnnnnnnnnnnnnnnnnnnnnnnnnnnnnnnnnnnnnnnnnnnnnnnnnnnnnnnnnnnnnnnnnnnnnnnnnnnnnnnnnnnnnnnnnnnnnnnnnnnnnnnnnnnnnnnnnnnnnnnnnnnnnnnnnnnnnnnnnnnnnnnnnnnnnnnnnnnnnnnnnnnnnnnnnnnnnnnnnnnnnnnnnnnnnnnnnnnnnnnnnnnnnnnnnnnnnnnnnnnnnnnnnnnnnnnnnnnnnnnnnnnnnnnnnnnnnnnnnnnnnnnnnnnnnnnnnnnnnnnnnnnnnnnnnnnnnnnnnnnnnnnnnnnnnnnnnnnnnnnnnnnnnnnnnnnnnnnnnnnnnnnnnnnnnnnnnnnnnnnnnnnnnnnnnnnnnnnnnnnnnnnnnnnnnnnnnnnnnnnnnnnnnnnnnnnnnnnnnnnnnnnnnnnnnnnnnnnnnnnnnnnnnnnnnnnnnnnnnnnnnnnnnnnnnnnnnnnnnnnnnnnnnnnnnnnnnnnnnnnnnnnnnnnnnnnnnnnnnnnnnnnnnnnnnnnnnnnnnnnnnnnnnnnnnnnnnnnnnnnnnnnnnnnnnnnnnnnnnnnnnnnnnnnnnnnnnnnnnnnnnnnnnnnnnnnnnnnnnnnnnnnnnnnnnnnnnnnnnnnnnnnnnnnnnnnnnnnnnnnnnnnnnnnnnnnnnnnnnnnnnnnnnnnnnnnnnnnnnnnnnnnnnnnnnnnnnnnnnnnnnnnnnnnnnnnnnnnnnnnnnnnnnnnnnnnnnnnnnnnnnnnnnnnnnnnnnnnnnnnnnnnnnnnnnnnnnnnnnnnnnnnnnnnnnnnnnnnnnnnnnnnnnnnnnnnnnnnnnnnnnnnnnnnnnnnnnnnnnnnnnnnnnnnnnnnnnnnnnnnnnnnnnnnnnnnnnnnnnnnnnnnnnnnnnnnnnnnnnnnnnnnnnnnnnnnnnnnnnnnnnnnnnnnnnnnnnnnnnnnnnnnnnnnnnnnnnnnnnnnnnnnnnnnnnnnnnnnnnnnnnnnnnnnnnnnnnnnnnnnnnnnnnnnnnnnnnnnnnnnnnnnnnnnnnnnnnnnnnnnnnnnnnnnnnnnnnnnnnnnnnnnnnnnnnnnnnnnnnnnnnnnnnnnnnnnnnnnnnnnnnnnnnnnnnnnnnnnnnnnnnnnnnnnnnnnnnnnnnnnnnnnnnnnnnnnnnnnnnnnnnnnnnnnnnnnnnnnnnnnnnnnnnnnnnnnnnnnnnnnnnnnnnnnnnnnnnnnnnnnnnnnnnnnnnnnnnnnnnnnnnnnnnnnnnnnnnnnnnnnnnnnnnnnnnnnnnnnnnnnnnnnnnnnnnnnnnnnnnnnnnnnnnnnnnnnnnnnnnnnnnnnnnnnnnnnnnnnnnnnnnnnnnnnnnnnnnnnnnnnnnnnnnnnnnnnnnnnnnnnnnnnnnnnnnnnnnnnnnnnnnnnnnnnnnnnnnnnnnnnnnnnnnnnnnnnnnnnnnnnnnnnnnnnnnnnnnnnnnnnnnnnnnnnnnnnnnnnnnnnnnnnnnnnnnnnnnnnnnnnnnnnnnnnnnnnnnnnnnnnnnnnnnnnnnnnnnnnnnnnnnnnnnnnnnnnnnnnnnnnnnnnnnnnnnnnnnnnnnnnnnnnnnnnnnnnnnnnnnnnnnnnnnnnnnnnnnnnnnnnnnnnnnnnnnnnnnnnnnnnnnnnnnnnnnnnnnnnnnnnnnnnnnnnnnnnnnnnnnnnnnnnnnnnnnnnnnnnnnnnnnnnnnnnnnnnnnnnnnnnnnnnnnnnnnnnnnnnnnnnnnnnnnnnnnnnnnnnnnnnnnnnnnnnnnnnnnnnnnnnnnnnnnnnnnnnnnnnnnnnnnnnnnnnnnnnnnnnnnnnnnnnnnnnnnnnnnnnnnnnnnnnnnnnnnnnnnnnnnnnnnnnnnnnnnnnnnnnnnnnnnnnnnnnnnnnnnnnnnnnnnnnnnnnnnnnnnnnnnnnnnnnnnnnnnnnnnnnnnnnnnnnnnnnnnnnnnnnnnnnnnnnnnnnnnnnnnnnnnnnnnnnnnnnnnnnnnnnnnnnnnnnnnnnnnnnnnnnnnnnnnnnnnnnnnnnnnnnnnnnnnnnnnnnnnnnnnnnnnnnnnnnnnnnnnnnnnnnnnnnnnnnnnnnnnnnnnnnnnnnnnnnnnnnnnnnnnnnnnnnnnnnnnnnnnnnnnnnnnnnnnnnnnnnnnnnnnnnnnnnnnnnnnnnnnnnnnnnnnnnnnnnnnnnnnnnnnnnnnnnnnnnnnnnnnnnnnnnnnnnnnnnnnnnnnnnnnnnnnnnnnnnnnnnnnnnnnnnnnnnnnnnnnnnnnnnnnnnnnnnnnnnnnnnnnnnnnnnnnnnnnnnnnnnnnnnnnnnnnnnnnnnnnnnnnnnnnnnnnnnnnnnnnnnnnnnnnnnnnnnnnnnnnnnnnnnnnnnnnnnnnnnnnnnnnnnnnnnnnnnnnnnnnnnnnnnnnnnnnnnnnnnnnnnnnnnnnnnnnnnnnnnnnnnnnnnnnnnnnnnnnnnnnnnnnnnnnnnnnnnnnnnnnnnnnnnnnnnnnnnnnnnnnnnnnnnnnnnnnnnnnnnnnnnnnnnnnnnnnnnnnnnnnnnnnnnnnnnnnnnnnnnnnnnnnnnnnnnnnnnnnnnnnnnnnnnnnnnnnnnnnnnnnnnnnnnnnnnnnnnnnnnnnnnnnnnnnnnnnnnnnnnnnnnnnnnnnnnnnnnnnnnnnnnnnnnnnnnnnnnnnnnnnnnnnnnnnnnnnnnnnnnnnnnnnnnnnnnnnnnnnnnnnnnnnnnnnnnnnnnnnnnnnnnnnnnnnnnnnnnnnnnnnnnnnnnnnnnnnnnnnnnnnnnnnnnnnnnnnnnnnnnnnnnnnnnnnnnnnnnnnnnnnnnnnnnnnnnnnnnnnnnnnnnnnnnnnnnnnnnnnnnnnnnnnnnnnnnnnnnnnnnnnnnnnnnnnnnnnnnnnnnnnnnnnnnnnnnnnnnnnnnnnnnnnnnnnnnnnnnnnnnnnnnnnnnnnnnnnnnnnnnnnnnnnnnnnnnnnnnnnnnnnnnnnnnnnnnnnnnnnnnnnnnnnnnnnnnnnnnnnnnnnnnnnnnnnnnnnnnnnnnnnnnnnnnnnnnnnnnnnnnnnnnnnnnnnnnnnnnnnnnnnnnnnnnnnnnnnnnnnnnnnnnnnnnnnnnnnnnnnnnnnnnnnnnnnnnnnnnnnnnnnnnnnnnnnnnnnnnnnnnnnnnnnnnnnnnnnnnnnnnnnnnnnnnnnnnnnnnnnnnnnnnnnnnnnnnnnnnnnnnnnnnnnnnnnnnnnnnnnnnnnnnnnnnnnnnnnnnnnnnnnnnnnnnnnnnnnnnnnnnnnnnnnnnnnnnnnnnnnnnnnnnnnnnnnnnnnnnnnnnnnnnnnnnnnnnnnnnnnnnnnnnnnnnnnnnnnnnnnnnnnnnnnnnnnnnnnnnnnnnnnnnnnnnnnnnnnnnnnnnnnnnnnnnnnnnnnnnnnnnnnnnnnnnnnnnnnnnnnnnnnnnnnnnnnnnnnnnnnnnnnnnnnnnnnnnnnnnnnnnnnnnnnnnnnnnnnnnnnnnnnnnnnnnnnnnnnnnnnnnnnnnnnnnnnnnnnnnnnnnnnnnnnnnnnnnnnnnnnnnnnnnnnnnnnnnnnnnnnnnnnnnnnnnnnnnnnnnnnnnnnnnnnnnnnnnnnnnnnnnnnnnnnnnnnnnnnnnnnnnnnnnnnnnnnnnnnnnnnnnnnnnnnnnnnnnnnnnnnnnnnnnnnnnnnnnnnnnnnnnnnnnnnnnnnnnnnnnnnnnnnnnnnnnnnnnnnnnnnnnnnnnnnnnnnnnnnnnnnnnnnnnnnnnnnnnnnnnnnnnnnnnnnnnnnnnnnnnnnnnnnnnnnnnnnnnnnnnnnnnnnnnnnnnnnnnnnnnnnnnnnnnnnnnnnnnnnnnnnnnnnnnnnnnnnnnnnnnnnnnnnnnnnnnnnnnnnnnnnnnnnnnnnnnnnnnnnnnnnnnnnnnnnnnnnnnnnnnnnnnnnnnnnnnnnnnnnnnnnnnnnnnnnnnnnnnnnnnnnnnnnnnnnnnnnnnnnnnnnnnnnnnnnnnnnnnnnnnnnnnnnnnnnnnnnnnnnnnnnnnnnnnnnnnnnnnnnnnnnnnnnnnnnnnnnnnnnnnnnnnnnnnnnnnnnnnnnnnnnnnnnnnnnnnnnnnnnnnnnnnnnnnnnnnnnnnnnnnnnnnnnnnnnnnnnnnnnnnnnnnnnnnnnnnnnnnnnnnnnnnnnnnnnnnnnnnnnnnnnnnnnnnnnnnnnnnnnnnnnnnnnnnnnnnnnnnnnnnnnnnnnnnnnnnnnnnnnnnnnnnnnnnnnnnnnnnnnnnnnnnnnnnnnnnnnnnnnnnnnnnnnnnnnnnnnnnnnnnnnnnnnnnnnnnnnnnnnnnnnnnnnnnnnnnnnnnnnnnnnnnnnnnnnnnnnnnnnnnnnnnnnnnnnnnnnnnnnnnnnnnnnnnnnnnnnnnnnnnnnnnnnnnnnnnnnnnnnnnnnnnnnnnnnnnnnnnnnnnnnnnnnnnnnnnnnnnnnnnnnnnnnnnnnnnnnnnnnnnnnnnnnnnnnnnnnnnnnnnnnnnnnnnnnnnnnnnnnnnnnnnnnnnnnnnnnnnnnnnnnnnnnnnnnnnnnnnnnnnnnnnnnnnnnnnnnnnnnnnnnnnnnnnnnnnnnnnnnnnnnnnnnnnnnnnnnnnnnnnnnnnnnnnnnnnnnnnnnnnnnnnnnnnnnnnnnnnnnnnnnnnnnnnnnnnnnnnnnnnnnnnnnnnnnnnnnnnnnnnnnnnnnnnnnnnnnnnnnnnnnnnnnnnnnnnnnnnnnnnnnnnnnnnnnnnnnnnnnnnnnnnnnnnnnnnnnnnnnnnnnnnnnnnnnnnnnnnnnnnnnnnnnnnnnnnnnnnnnnnnnnnnnnnnnnnnnnnnnnnnnnnnnnnnnnnnnnnnnnnnnnnnnnnnnnnnnnnnnnnnnnnnnnnnnnnnnnnnnnnnnnnnnnnnnnnnnnnnnnnnnnnnnnnnnnnnnnnnnnnnnnnnnnnnnnnnnnnnnnnnnnnnnnnnnnnnnnnnnnnnnnnnnnnnnnnnnnnnnnnnnnnnnnnnnnnnnnnnnnnnnnnnnnnnnnnnnnnnnnnnnnnnnnnnnnnnnnnnnnnnnnnnnnnnnnnnnnnnnnnnnnnnnnnnnnnnnnnnnnnnnnnnnnnnnnnnnnnnnnnnnnnnnnnnnnnnnnnnnnnnnnnnnnnnnnnnnnnnnnnnnnnnnnnnnnnnnnnnnnnnnnnnnnnnnnnnnnnnnnnnnnnnnnnnnnnnnnnnnnnnnnnnnnnnnnnnnnnnnnnnnnnnnnnnnnnnnnnnnnnnnnnnnnnnnnnnnnnnnnnnnnnnnnnnnnnnnnnnnnnnnnnnnnnnnnnnnnnnnnnnnnnnnnnnnnnnnnnnnnnnnnnnnnnnnnnnnnnnnnnnnnnnnnnnnnnnnnnnnnnnnnnnnnnnnnnnnnnnnnnnnnnnnnnnnnnnnnnnnnnnnnnnnnnnnnnnnnnnnnnnnnnnnnnnnnnnnnnnnnnnnnnnnnnnnnnnnnnnnnnnnnnnnnnnnnnnnnnnnnnnnnnnnnnnnnnnnnnnnnnnnnnnnnnnnnnnnnnnnnnnnnnnnnnnnnnnnnnnnnnnnnnnnnnnnnnnnnnnnnnnnnnnnnnnnnnnnnnnnnnnnnnnnnnnnnnnnnnnnnnnnnnnnnnnnnnnnnnnnnnnnnnnnnnnnnnnnnnnnnnnnnnnnnnnnnnnnnnnnnnnnnnnnnnnnnnnnnnnnnnnnnnnnnnnnnnnnnnnnnnnnnnnnnnnnnnnnnnnnnnnnnnnnnnnnnnnnnnnnnnnnnnnnnnnnnnnnnnnnnnnnnnnnnnnnnnnnnnnnnnnnnnnnnnnnnnnnnnnnnnnnnnnnnnnnnnnnnnnnnnnnnnnnnnnnnnnnnnnnnnnnnnnnnnnnnnnnnnnnnnnnnnnnnnnnnnnnnnnnnnnnnnnnnnnnnnnnnnnnnnnnnnnnnnnnnnnnnnnnnnnnnnnnnnnnnnnnnnnnnnnnnnnnnnnnnnnnnnnnnnnnnnnnnnnnnnnnnnnnnnnnnnnnnnnnnnnnnnnnnnnnnnnnnnnnnnnnnnnnnnnnnnnnnnnnnnnnnnnnnnnnnnnnnnnnnnnnnnnnnnnnnnnnnnnnnnnnnnnnnnnnnnnnnnnnnnnnnnnnnnnnnnnnnnnnnnnnnnnnnnnnnnnnnnnnnnnnnnnnnnnnnnnnnnnnnnnnnnnnnnnnnnnnnnnnnnnnnnnnnnnnnnnnnnnnnnnnnnnnnnnnnnnnnnnnnnnnnnnnnnnnnnnnnnnnnnnnnnnnnnnnnnnnnnnnnnnnnnnnnnnnnnnnnnnnnnnnnnnnnnnnnnnnnnnnnnnnnnnnnnnnnnnnnnnnnnnnnnnnnnnnnnnnnnnnnnnnnnnnnnnnnnnnnnnnnnnnnnnnnnnnnnnnnnnnnnnnnnnnnnnnnnnnnnnnnnnnnnnnnnnnnnnnnnnnnnnnnnnnnnnnnnnnnnnnnnnnnnnnnnnnnnnnnnnnnnnnnnnnnnnnnnnnnnnnnnnnnnnnnnnnnnnnnnnnnnnnnnnnnnnnnnnnnnnnnnnnnnnnnnnnnnnnnnnnnnnnnnnnnnnnnnnnnnnnnnnnnnnnnnnnnnnnnnnnnnnnnnnnnnnnnnnnnnnnnnnnnnnnnnnnnnnnnnnnnnnnnnnnnnnnnnnnnnnnnnnnnnnnnnnnnnnnnnnnnnnnnnnnnnnnnnnnnnnnnnnnnnnnnnnnnnnnnnnnnnnnnnnnnnnnnnnnnnnnnnnnnnnnnnnnnnnnnnnnnnnnnnnnnnnnnnnnnnnnnnnnnnnnnnnnnnnnnnnnnnnnnnnnnnnnnnnnnnnnnnnnnnnnnnnnnnnnnnnnnnnnnnnnnnnnnnnnnnnnnnnnnnnnnnnnnnnnnnnnnnnnnnnnnnnnnnnnnnnnnnnnnnnnnnnnnnnnnnnnnnnnnnnnnnnnnnnnnnnnnnnnnnnnnnnnnnnnnnnnnnnnnnnnnnnnnnnnnnnnnnnnnnnnnnnnnnnnnnnnnnnnnnnnnnnnnnnnnnnnnnnnnnnnnnnnnnnnnnnnnnnnnnnnnnnnnnnnnnnnnnnnnnnnnnnnnnnnnnnnnnnnnnnnnnnnnnnnnnnnnnnnnnnnnnnnnnnnnnnnnnnnnnnnnnnnnnnnnnnnnnnnnnnnnnnnnnnnnnnnnnnnnnnnnnnnnnnnnnnnnnnnnnnnnnnnnnnnnnnnnnnnnnnnnnnnnnnnnnnnnnnnnnnnnnnnnnnnnnnnnnnnnnnnnnnnnnnnnnnnnnnnnnnnnnnnnnnnnnnnnnnnnnnnnnnnnnnnnnnnnnnnnnnnnnnnnnnnnnnnnnnnnnnnnnnnnnnnnnnnnnnnnnnnnnnnnnnnnnnnnnnnnnnnnnnnnnnnnnnnnnnnnnnnnnnnnnnnnnnnnnnnnnnnnnnnnnnnnnnnnnnnnnnnnnnnnnnnnnnnnnnnnnnnnnnnnnnnnnnnnnnnnnnnnnnnnnnnnnnnnnnnnnnnnnnnnnnnnnnnnnnnnnnnnnnnnnnnnnnnnnnnnnnnnnnnnnnnnnnnnnnnnnnnnnnnnnnnnnnnnnnnnnnnnnnnnnnnnnnnnnnnnnnnnnnnnnnnnnnnnnnnnnnnnnnnnnnnnnnnnnnnnnnnnnnnnnnnnnnnnnnnnnnnnnnnnnnnnnnnnnnnnnnnnnnnnnnnnnnnnnnnnnnnnnnnnnnnnnnnnnnnnnnnnnnnnnnnnnnnnnnnnnnnnnnnnnnnnnnnnnnnnnnnnnnnnnnnnnnnnnnnnnnnnnnnnnnnnnnnnnnnnnnnnnnnnnnnnnnnnnnnnnnnnnnnnnnnnnnnnnnnnnnnnnnnnnnnnnnnnnnnnnnnnnnnnnnnnnnnnnnnnnnnnnnnnnnnnnnnnnnnnnnnnnnnnnnnnnnnnnnnnnnnnnnnnnnnnnnnnnnnnnnnnnnnnnnnnnnnnnnnnnnnnnnnnnnnnnnnnnnnnnnnnnnnnnnnnnnnnnnnnnnnnnnnnnnnnnnnnnnnnnnnnnnnnnnnnnnnnnnnnnnnnnnnnnnnnnnnnnnnnnnnnnnnnnnnnnnnnnnnnnnnnnnnnnnnnnnnnnnnnnnnnnnnnnnnnnnnnnnnnnnnnnnnnnnnnnnnnnnnnnnnnnnnnnnnnnnnnnnnnnnnnnnnnnnnnnnnnnnnnnnnnnnnnnnnnnnnnnnnnnnnnnnnnnnnnnnnnnnnnnnnnnnnnnnnnnnnnnnnnnnnnnnnnnnnnnnnnnnnnnnnnnnnnnnnnnnnnnnnnnnnnnnnnnnnnnnnnnnnnnnnnnnnnnnnnnnnnnnnnnnnnnnnnnnnnnnnnnnnnnnnnnnnnnnnnnnnnnnnnnnnnnnnnnnnnnnnnnnnnnnnnnnnnnnnnnnnnnnnnnnnnnnnnnnnnnnnnnnnnnnnnnnnnnnnnnnnnnnnnnnnnnnnnnnnnnnnnnnnnnnnnnnnnnnnnnnnnnnnnnnnnnnnnnnnnnnnnnnnnnnnnnnnnnnnnnnnnnnnnnnnnnnnnnnnnnnnnnnnnnnnnnnnnnnnnnnnnnnnnnnnnnnnnnnnnnnnnnnnnnnnnnnnnnnnnnnnnnnnnnnnnnnnnnnnnnnnnnnnnnnnnnnnnnnnnnnnnnnnnnnnnnnnnnnnnnnnnnnnnnnnnnnnnnnnnnnnnnnnnnnnnnnnnnnnnnnnnnnnnnnnnnnnnnnnnnnnnnnnnnnnnnnnnnnnnnnnnnnnnnnnnnnnnnnnnnnnnnnnnnnnnnnnnnnnnnnnnnnnnnnnnnnnnnnnnnnnnnnnnnnnnnnnnnnnnnnnnnnnnnnnnnnnnnnnnnnnnnnnnnnnnnnnnnnnnnnnnnnnnnnnnnnnnnnnnnnnnnnnnnnnnnnnnnnnnnnnnnnnnnnnnnnnnnnnnnnnnnnnnnnnnnnnnnnnnnnnnnnnnnnnnnnnnnnnnnnnnnnnnnnnnnnnnnnnnnnnnnnnnnnnnnnnnnnnnnnnnnnnnnnnnnnnnnnnnnnnnnnnnnnnnnnnnnnnnnnnnnnnnnnnnnnnnnnnnnnnnnnnnnnnnnnnnnnnnnnnnnnnnnnnnnnnnnnnnnnnnnnnnnnnnnnnnnnnnnnnnnnnnnnnnnnnnnnnnnnnnnnnnnnnnnnnnnnnnnnnnnnnnnnnnnnnnnnnnnnnnnnnnnnnnnnnnnnnnnnnnnnnnnnnnnnnnnnnnnnnnnnnnnnnnnnnnnnnnnnnnnnnnnnnnnnnnnnnnnnnnnnnnnnnnnnnnnnnnnnnnnnnnnnnnnnnnnnnnnnnnnnnnnnnnnnnnnnnnnnnnnnnnnnnnnnnnnnnnnnnnnnnnnnnnnnnnnnnnnnnnnnnnnnnnnnnnnnnnnnnnnnnnnnnnnnnnnnnnnnnnnnnnnnnnnnnnnnnnnnnnnnnnnnnnnnnnnnnnnnnnnnnnnnnnnnnnnnnnnnnnnnnnnnnnnnnnnnnnnnnnnnnnnnnnnnnnnnnnnnnnnnnnnnnnnnnnnnnnnnnnnnnnnnnnnnnnnnnnnnnnnnnnnnnnnnnnnnnnnnnnnnnnnnnnnnnnnnnnnnnnnnnnnnnnnnnnnnnnnnnnnnnnnnnnnnnnnnnnnnnnnnnnnnnnnnnnnnnnnnnnnnnnnnnnnnnnnnnnnnnnnnnnnnnnnnnnnnnnnnnnnnnnnnnnnnnnnnnnnnnnnnnnnnnnnnnnnnnnnnnnnnnnnnnnnnnnnnnnnnnnnnnnnnnnnnnnnnnnnnnnnnnnnnnnnnnnnnnnnnnnnnnnnnnnnnnnnnnnnnnnnnnnnnnnnnnnnnnnnnnnnnnnnnnnnnnnnnnnnnnnnnnnnnnnnnnnnnnnnnnnnnnnnnnnnnnnnnnnnnnnnnnnnnnnnnnnnnnnnnnnnnnnnnnnnnnnnnnnnnnnnnnnnnnnnnnnnnnnnnnnnnnnnnnnnnnnnnnnnnnnnnnnnnnnnnnnnnnnnnnnnnnnnnnnnnnnnnnnnnnnnnnnnnnnnnnnnnnnnnnnnnnnnnnnnnnnnnnnnnnnnnnnnnnnnnnnnnnnnnnnnnnnnnnnnnnnnnnnnnnnnnnnnnnnnnnnnnnnnnnnnnnnnnnnnnnnnnnnnnnnnnnnnnnnnnnnnnnnnnnnnnnnnnnnnnnnnnnnnnnnnnnnnnnnnnnnnnnnnnnnnnnnnnnnnnnnnnnnnnnnnnnnnnnnnnnnnnnnnnnnnnnnnnnnnnnnnnnnnnnnnnnnnnnnnnnnnnnnnnnnnnnnnnnnnnnnnnnnnnnnnnnnnnnnnnnnnnnnnnnnnnnnnnnnnnnnnnnnnnnnnnnnnnnnnnnnnnnnnnnnnnnnnnnnnnnnnnnnnnnnnnnnnnnnnnnnnnnnnnnnnnnnnnnnnnnnnnnnnnnnnnnnnnnnnnnnnnnnnnnnnnnnnnnnnnnnnnnnnnnnnnnnnnnnnnnnnnnnnnnnnnnnnnnnnnnnnnnnnnnnnnnnnnnnnnnnnnnnnnnnnnnnnnnnnnnnnnnnnnnnnnnnnnnnnnnnnnnnnnnnnnnnnnnnnnnnnnnnnnnnnnnnnnnnnnnnnnnnnnnnnnnnnnnnnnnnnnnnnnnnnnnnnnnnnnnnnnnnnnnnnnnnnnnnnnnnnnnnnnnnnnnnnnnnnnnnnnnnnnnnnnnnnnnnnnnnnnnnnnnnnnnnnnnnnnnnnnnnnnnnnnnnnnnnnnnnnnnnnnnnnnnnnnnnnnnnnnnnnnnnnnnnnnnnnnnnnnnnnnnnnnnnnnnnnnnnnnnnnnnnnnnnnnnnnnnnnnnnnnnnnnnnnnnnnnnnnnnnnnnnnnnnnnnnnnnnnnnnnnnnnnnnnnnnnnnnnnnnnnnnnnnnnnnnnnnnnnnnnnnnnnnnnnnnnnnnnnnnnnnnnnnnnnnnnnnnnnnnnnnnnnnnnnnnnnnnnnnnnnnnnnnnnnnnnnnnnnnnnnnnnnnnnnnnnnnnnnnnnnnnnnnnnnnnnnnnnnnnnnnnnnnnnnnnnnnnnnnnnnnnnnnnnnnnnnnnnnnnnnnnnnnnnnnnnnnnnnnnnnnnnnnnnnnnnnnnnnnnnnnnnnnnnnnnnnnnnnnnnnnnnnnnnnnnnnnnnnnnnnnnnnnnnnnnnnnnnnnnnnnnnnnnnnnnnnnnnnnnnnnnnnnnnnnnnnnnnnnnnnnnnnnnnnnnnnnnnnnnnnnnnnnnnnnnnnnnnnnnnnnnnnnnnnnnnnnnnnnnnnnnnnnnnnnnnnnnnnnnnnnnnnnnnnnnnnnnnnnnnnnnnnnnnnnnnnnnnnnnnnnnnnnnnnnnnnnnnnnnnnnnnnnnnnnnnnnnnnnnnnnnnnnnnnnnnnnnnnnnnnnnnnnnnnnnnnnnnnnnnnnnnnnnnnnnnnnnnnnnnnnnnnnnnnnnnnnnnnnnnnnnnnnnnnnnnnnnnnnnnnnnnnnnnnnnnnnnnnnnnnnnnnnnnnnnnnnnnnnnnnnnnnnnnnnnnnnnnnnnnnnnnnnnnnnnnnnnnnnnnnnnnnnnnnnnnnnnnnnnnnnnnnnnnnnnnnnnnnnnnnnnnnnnnnnnnnnnnnnnnnnnnnnnnnnnnnnnnnnnnnnnnnnnnnnnnnnnnnnnnnnnnnnnnnnnnnnnnnnnnnnnnnnnnnnnnnnnnnnnnnnnnnnnnnnnnnnnnnnnnnnnnnnnnnnnnnnnnnnnnnnnnnnnnnnnnnnnnnnnnnnnnnnnnnnnnnnnnnnnnnnnnnnnnnnnnnnnnnnnnnnnnnnnnnnnnnnnnnnnnnnnnnnnnnnnnnnnnnnnnnnnnnnnnnnnnnnnnnnnnnnnnnnnnnnnnnnnnnnnnnnnnnnnnnnnnnnnnnnnnnnnnnnnnnnnnnnnnnnnnnnnnnnnnnnnnnnnnnnnnnnnnnnnnnnnnnnnnnnnnnnnnnnnnnnnnnnnnnnnnnnnnnnnnnnnnnnnnnnnnnnnnnnnnnnnnnnnnnnnnnnnnnnnnnnnnnnnnnnnnnnnnnnnnnnnnnnnnnnnnnnnnnnnnnnnnnnnnnnnnnnnnnnnnnnnnnnnnnnnnnnnnnnnnnnnnnnnnnnnnnnnnnnnnnnnnnnnnnnnnnnnnnnnnnnnnnnnnnnnnnnnnnnnnnnnnnnnnnnnnnnnnnnnnnnnnnnnnnnnnnnnnnnnnnnnnnnnnnnnnnnnnnnnnnnnnnnnnnnnnnnnnnnnnnnnnnnnnnnnnnnnnnnnnnnnnnnnnnnnnnnnnnnnnnnnnnnnnnnnnnnnnnnnnnnnnnnnnnnnnnnnnnnnnnnnnnnnnnnnnnnnnnnnnnnnnnnnnnnnnnnnnnnnnnnnnnnnnnnnnnnnnnnnnnnnnnnnnnnnnnnnnnnnnnnnnnnnnnnnnnnnnnnnnnnnnnnnnnnnnnnnnnnnnnnnnnnnnnnnnnnnnnnnnnnnnnnnnnnnnnnnnnnnnnnnnnnnnnnnnnnnnnnnnnnnnnnnnnnnnnnnnnnnnnnnnnnnnnnnnnnnnnnnnnnnnnnnnnnnnnnnnnnnnnnnnnnnnnnnnnnnnnnnnnnnnnnnnnnnnnnnnnnnnnnnnnnnnnnnnnnnnnnnnnnnnnnnnnnnnnnnnnnnnnnnnnnnnnnnnnnnnnnnnnnnnnnnnnnnnnnnnnnnnnnnnnnnnnnnnnnnnnnnnnnnnnnnnnnnnnnnnnnnnnnnnnnnnnnnnnnnnnnnnnnnnnnnnnnnnnnnnnnnnnnnnnnnnnnnnnnnnnnnnnnnnnnnnnnnnnnnnnnnnnnnnnnnnnnnnnnnnnnnnnnnnnnnnnnnnnnnnnnnnnnnnnnnnnnnnnnnnnnnnnnnnnnnnnnnnnnnnnnnnnnnnnnnnnnnnnnnnnnnnnnnnnnnnnnnnnnnnnnnnnnnnnnnnnnnnnnnnnnnnnnnnnnnnnnnnnnnnnnnnnnnnnnnnnnnnnnnnnnnnnnnnnnnnnnnnnnnnnnnnnnnnnnnnnnnnnnnnnnnnnnnnnnnnnnnnnnnnnnnnnnnnnnnnnnnnnnnnnnnnnnnnnnnnnnnnnnnnnnnnnnnnnnnnnnnnnnnnnnnnnnnnnnnnnnnnnnnnnnnnnnnnnnnnnnnnnnnnnnnnnnnnnnnnnnnnnnnnnnnnnnnnnnnnnnnnnnnnnnnnnnnnnnnnnnnnnnnnnnnnnnnnnnnnnnnnnnnnnnnnnnnnnnnnnnnnnnnnnnnnnnnnnnnnnnnnnnnnnnnnnnnnnnnnnnnnnnnnnnnnnnnnnnnnnnnnnnnnnnnnnnnnnnnnnnnnnnnnnnnnnnnnnnnnnnnnnnnnnnnnnnnnnnnnnnnnnnnnnnnnnnnnnnnnnnnnnnnnnnnnnnnnnnnnnnnnnnnnnnnnnnnnnnnnnnnnnnnnnnnnnnnnnnnnnnnnnnnnnnnnnnnnnnnnnnnnnnnnnnnnnnnnnnnnnnnnnnnnnnnnnnnnnnnnnnnnnnnnnnnnnnnnnnnnnnnnnnnnnnnnnnnnnnnnnnnnnnnnnnnnnnnnnnnnnnnnnnnnnnnnnnnnnnnnnnnnnnnnnnnnnnnnnnnnnnnnnnnnnnnnnnnnnnnnnnnnnnnnnnnnnnnnnnnnnnnnnnnnnnnnnnnnnnnnnnnnnnnnnnnnnnnnnnnnnnnnnnnnnnnnnnnnnnnnnnnnnnnnnnnnnnnnnnnnnnnnnnnnnnnnnnnnnnnnnnnnnnnnnnnnnnnnnnnnnnnnnnnnnnnnnnnnnnnnnnnnnnnnnnnnnnnnnnnnnnnnnnnnnnnnnnnnnnnnnnnnnnnnnnnnnnnnnnnnnnnnnnnnnnnnnnnnnnnnnnnnnnnnnnnnnnnnnnnnnnnnnnnnnnnnnnnnnnnnnnnnnnnnnnnnnnnnnnnnnnnnnnnnnnnnnnnnnnnnnnnnnnnnnnnnnnnnnnnnnnnnnnnnnnnnnnnnnnnnnnnnnnnnnnnnnnnnnnnnnnnnnnnnnnnnnnnnnnnnnnnnnnnnnnnnnnnnnnnnnnnnnnnnnnnnnnnnnnnnnnnnnnnnnnnnnnnnnnnnnnnnnnnnnnnnnnnnnnnnnnnnnnnnnnnnnnnnnnnnnnnnnnnnnnnnnnnnnnnnnnnnnnnnnnnnnnnnnnnnnnnnnnnnnnnnnnnnnnnnnnnnnnnnnnnnnnnnnnnnnnnnnnnnnnnnnnnnnnnnnnnnnnnnnnnnnnnnnnnnnnnnnnnnnnnnnnnnnnnnnnnnnnnnnnnnnnnnnnnnnnnnnnnnnnnnnnnnnnnnnnnnnnnnnnnnnnnnnnnnnnnnnnnnnnnnnnnnnnnnnnnnnnnnnnnnnnnnnnnnnnnnnnnnnnnnnnnnnnnnnnnnnnnnnnnnnnnnnnnnnnnnnnnnnnnnnnnnnnnnnnnnnnnnnnnnnnnnnnnnnnnnnnnnnnnnnnnnnnnnnnnnnnnnnnnnnnnnnnnnnnnnnnnnnnnnnnnnnnnnnnnnnnnnnnnnnnnnnnnnnnnnnnnnnnnnnnnnnnnnnnnnnnnnnnnnnnnnnnnnnnnnnnnnnnnnnnnnnnnnnnnnnnnnnnnnnnnnnnnnnnnnnnnnnnnnnnnnnnnnnnnnnnnnnnnnnnnnnnnnnnnnnnnnnnnnnnnnnnnnnnnnnnnnnnnnnnnnnnnnnnnnnnnnnnnnnnnnnnnnnnnnnnnnnnnnnnnnnnnnnnnnnnnnnnnnnnnnnnnnnnnnnnnnnnnnnnnnnnnnnnnnnnnnnnnnnnnnnnnnnnnnnnnnnnnnnnnnnnnnnnnnnnnnnnnnnnnnnnnnnnnnnnnnnnnnnnnnnnnnnnnnnnnnnnnnnnnnnnnnnnnnnnnnnnnnnnnnnnnnnnnnnnnnnnnnnnnnnnnnnnnnnnnnnnnnnnnnnnnnnnnnnnnnnnnnnnnnnnnnnnnnnnnnnnnnnnnnnnnnnnnnnnnnnnnnnnnnnnnnnnnnnnnnnnnnnnnnnnnnnnnnnnnnnnnnnnnnnnnnnnnnnnnnnnnnnnnnnnnnnnnnnnnnnnnnnnnnnnnnnnnnnnnnnnnnnnnnnnnnnnnnnnnnnnnnnnnnnnnnnnnnnnnnnnnnnnnnnnnnnnnnnnnnnnnnnnnnnnnnnnnnnnnnnnnnnnnnnnnnnnnnnnnnnnnnnnnnnnnnnnnnnnnnnnnnnnnnnnnnnnnnnnnnnnnnnnnnnnnnnnnnnnnnnnnnnnnnnnnnnnnnnnnnnnnnnnnnnnnnnnnnnnnnnnnnnnnnnnnnnnnnnnnnnnnnnnnnnnnnnnnnnnnnnnnnnnnnnnnnnnnnnnnnnnnnnnnnnnnnnnnnnnnnnnnnnnnnnnnnnnnnnnnnnnnnnnnnnnnnnnnnnnnnnnnnnnnnnnnnnnnnnnnnnnnnnnnnnnnnnnnnnnnnnnnnnnnnnnnnnnnnnnnnnnnnnnnnnnnnnnnnnnnnnnnnnnnnnnnnnnnnnnnnnnnnnnnnnnnnnnnnnnnnnnnnnnnnnnnnnnnnnnnnnnnnnnnnnnnnnnnnnnnnnnnnnnnnnnnnnnnnnnnnnnnnnnnnnnnnnnnnnnnnnnnnnnnnnnnnnnnnnnnnnnnnnnnnnnnnnnnnnnnnnnnnnnnnnnnnnnnnnnnnnnnnnnnnnnnnnnnnnnnnnnnnnnnnnnnnnnnnnnnnnnnnnnnnnnnnnnnnnnnnnnnnnnnnnnnnnnnnnnnnnnnnnnnnnnnnnnnnnnnnnnnnnnnnnnnnnnnnnnnnnnnnnnnnnnnnnnnnnnnnnnnnnnnnnnnnnnnnnnnnnnnnnnnnnnnnnnnnnnnnnnnnnnnnnnnnnnnnnnnnnnnnnnnnnnnnnnnnnnnnnnnnnnnnnnnnnnnnnnnnnnnnnnnnnnnnnnnnnnnnnnnnnnnnnnnnnnnnnnnnnnnnnnnnnnnnnnnnnnnnnnnnnnnnnnnnnnnnnnnnnnnnnnnnnnnnnnnnnnnnnnnnnnnnnnnnnnnnnnnnnnnnnnnnnnnnnnnnnnnnnnnnnnnnnnnnnnnnnnnnnnnnnnnnnnnnnnnnnnnnnnnnnnnnnnnnnnnnnnnnnnnnnnnnnnnnnnnnnnnnnnnnnnnnnnnnnnnnnnnnnnnnnnnnnnnnnnnnnnnnnnnnnnnnnnnnnnnnnnnnnnnnnnnnnnnnnnnnnnnnnnnnnnnnnnnnnnnnnnnnnnnnnnnnnnnnnnnnnnnnnnnnnnnnnnnnnnnnnnnnnnnnnnnnnnnnnnnnnnnnnnnnnnnnnnnnnnnnnnnnnnnnnnnnnnnnnnnnnnnnnnnnnnnnnnnnnnnnnnnnnnnnnnnnnnnnnnnnnnnnnnnnnnnnnnnnnnnnnnnnnnnnnnnnnnnnnnnnnnnnnnnnnnnnnnnnnnnnnnnnnnnnnnnnnnnnnnnnnnnnnnnnnnnnnnnnnnnnnnnnnnnnnnnnnnnnnnnnnnnnnnnnnnnnnnnnnnnnnnnnnnnnnnnnnnnnnnnnnnnnnnnnnnnnnnnnnnnnnnnnnnnnnnnnnnnnnnnnnnnnnnnnnnnnnnnnnnnnnnnnnnnnnnnnnnnnnnnnnnnnnnnnnnnnnnnnnnnnnnnnnnnnnnnnnnnnnnnnnnnnnnnnnnnnnnnnnnnnnnnnnnnnnnnnnnnnnnnnnnnnnnnnnnnnnnnnnnnnnnnnnnnnnnnnnnnnnnnnnnnnnnnnnnnnnnnnnnnnnnnnnnnnnnnnnnnnnnnnnnnnnnnnnnnnnnnnnnnnnnnnnnnnnnnnnnnnnnnnnnnnnnnnnnnnnnnnnnnnnnnnnnnnnnnnnnnnnnnnnnnnnnnnnnnnnnnnnnnnnnnnnnnnnnnnnnnnnnnnnnnnnnnnnnnnnnnnnnnnnnnnnnnnnnnnnnnnnnnnnnnnnnnnnnnnnnnnnnnnnnnnnnnnnnnnnnnnnnnnnnnnnnnnnnnnnnnnnnnnnnnnnnnnnnnnnnnnnnnnnnnnnnnnnnnnnnnnnnnnnnnnnnnnnnnnnnnnnnnnnnnnnnnnnnnnnnnnnnnnnnnnnnnnnnnnnnnnnnnnnnnnnnnnnnnnnnnnnnnnnnnnnnnnnnnnnnnnnnnnnnnnnnnnnnnnnnnnnnnnnnnnnnnnnnnnnnnnnnnnnnnnnnnnnnnnnnnnnnnnnnnnnnnnnnnnnnnnnnnnnnnnnnnnnnnnnnnnnnnnnnnnnnnnnnnnnnnnnnnnnnnnnnnnnnnnnnnnnnnnnnnnnnnnnnnnnnnnnnnnnnnnnnnnnnnnnnnnnnnnnnnnnnnnnnnnnnnnnnnnnnnnnnnnnnnnnnnnnnnnnnnnnnnnnnnnnnnnnnnnnnnnnnnnnnnnnnnnnnnnnnnnnnnnnnnnnnnnnnnnnnnnnnnnnnnnnnnnnnnnnnnnnnnnnnnnnnnnnnnnnnnnnnnnnnnnnnnnnnnnnnnnnnnnnnnnnnnnnnnnnnnnnnnnnnnnnnnnnnnnnnnnnnnnnnnnnnnnnnnnnnnnnnnnnnnnnnnnnnnnnnnnnnnnnnnnnnnnnnnnnnnnnnnnnnnnnnnnnnnnnnnnnnnnnnnnnnnnnnnnnnnnnnnnnnnnnnnnnnnnnnnnnnnnnnnnnnnnnnnnnnnnnnnnnnnnnnnnnnnnnnnnnnnnnnnnnnnnnnnnnnnnnnnnnnnnnnnnnnnnnnnnnnnnnnnnnnnnnnnnnnnnnnnnnnnnnnnnnnnnnnnnnnnnnnnnnnnnnnnnnnnnnnnnnnnnnnnnnnnnnnnnnnnnnnnnnnnnnnnnnnnnnnnnnnnnnnnnnnnnnnnnnnnnnnnnnnnnnnnnnnnnnnnnnnnnnnnnnnnnnnnnnnnnnnnnnnnnnnnnnnnnnnnnnnnnnnnnnnnnnnnnnnnnnnnnnnnnnnnnnnnnnnnnnnnnnnnnnnnnnnnnnnnnnnnnnnnnnnnnnnnnnnnnnnnnnnnnnnnnnnnnnnnnnnnnnnnnnnnnnnnnnnnnnnnnnnnnnnnnnnnnnnnnnnnnnnnnnnnnnnnnnnnnnnnnnnnnnnnnnnnnnnnnnnnnnnnnnnnnnnnnnnnnnnnnnnnnnnnnnnnnnnnnnnnnnnnnnnnnnnnnnnnnnnnnnnnnnnnnnnnnnnnnnnnnnnnnnnnnnnnnnnnnnnnnnnnnnnnnnnnnnnnnnnnnnnnnnnnnnnnnnnnnnnnnnnnnnnnnnnnnnnnnnnnnnnnnnnnnnnnnnnnnnnnnnnnnnnnnnnnnnnnnnnnnnnnnnnnnnnnnnnnnnnnnnnnnnnnnnnnnnnnnnnnnnnnnnnnnnnnnnnnnnnnnnnnnnnnnnnnnnnnnnnnnnnnnnnnnnnnnnnnnnnnnnnnnnnnnnnnnnnnnnnnnnnnnnnnnnnnnnnnnnnnnnnnnnnnnnnnnnnnnnnnnnnnnnnnnnnnnnnnnnnnnnnnnnnnnnnnnnnnnnnnnnnnnnnnnnnnnnnnnnnnnnnnnnnnnnnnnnnnnnnnnnnnnnnnnnnnnnnnnnnnnnnnnnnnnnnnnnnnnnnnnnnnnnnnnnnnnnnnnnnnnnnnnnnnnnnnnnnnnnnnnnnnnnnnnnnnnnnnnnnnnnnnnnnnnnnnnnnnnnnnnnnnnnnnnnnnnnnnnnnnnnnnnnnnnnnnnnnnnnnnnnnnnnnnnnnnnnnnnnnnnnnnnnnnnnnnnnnnnnnnnnnnnnnnnnnnnnnnnnnnnnnnnnnnnnnnnnnnnnnnnnnnnnnnnnnnnnnnnnnnnnnnnnnnnnnnnnnnnnnnnnnnnnnnnnnnnnnnnnnnnnnnnnnnnnnnnnnnnnnnnnnnnnnnnnnnnnnnnnnnnnnnnnnnnnnnnnnnnnnnnnnnnnnnnnnnnnnnnnnnnnnnnnnnnnnnnnnnnnnnnnnnnnnnnnnnnnnnnnnnnnnnnnnnnnnnnnnnnnnnnnnnnnnnnnnnnnnnnnnnnnnnnnnnnnnnnnnnnnnnnnnnnnnnnnnnnnnnnnnnnnnnnnnnnnnnnnnnnnnnnnnnnnnnnnnnnnnnnnnnnnnnnnnnnnnnnnnnnnnnnnnnnnnnnnnnnnnnnnnnnnnnnnnnnnnnnnnnnnnnnnnnnnnnnnnnnnnnnnnnnnnnnnnnnnnnnnnnnnnnnnnnnnnnnnnnnnnnnnnnnnnnnnnnnnnnnnnnnnnnnnnnnnnnnnnnnnnnnnnnnnnnnnnnnnnnnnnnnnnnnnnnnnnnnnnnnnnnnnnnnnnnnnnnnnnnnnnnnnnnnnnnnnnnnnnnnnnnnnnnnnnnnnnnnnnnnnnnnnnnnnnnnnnnnnnnnnnnnnnnnnnnnnnnnnnnnnnnnnnnnnnnnnnnnnnnnnnnnnnnnnnnnnnnnnnnnnnnnnnnnnnnnnnnnnnnnnnnnnnnnnnnnnnnnnnnnnnnnnnnnnnnnnnnnnnnnnnnnnnnnnnnnnnnnnnnnnnnnnnnnnnnnnnnnnnnnnnnnnnnnnnnnnnnnnnnnnnnnnnnnnnnnnnnnnnnnnnnnnnnnnnnnnnnnnnnnnnnnnnnnnnnnnnnnnnnnnnnnnnnnnnnnnnnnnnnnnnnnnnnnnnnnnnnnnnnnnnnnnnnnnnnnnnnnnnnnnnnnnnnnnnnnnnnnnnnnnnnnnnnnnnnnnnnnnnnnnnnnnnnnnnnnnnnnnnnnnnnnnnnnnnnnnnnnnnnnnnnnnnnnnnnnnnnnnnnnnnnnnnnnnnnnnnnnnnnnnnnnnnnnnnnnnnnnnnnnnnnnnnnnnnnnnnnnnnnnnnnnnnnnnnnnnnnnnnnnnnnnnnnnnnnnnnnnnnnnnnnnnnnnnnnnnnnnnnnnnnnnnnnnnnnnnnnnnnnnnnnnnnnnnnnnnnnnnnnnnnnnnnnnnnnnnnnnnnnnnnnnnnnnnnnnnnnnnnnnnnnnnnnnnnnnnnnnnnnnnnnnnnnnnnnnnnnnnnnnnnnnnnnnnnnnnnnnnnnnnnnnnnnnnnnnnnnnnnnnnnnnnnnnnnnnnnnnnnnnnnnnnnnnnnnnnnnnnnnnnnnnnnnnnnnnnnnnnnnnnnnnnnnnnnnnnnnnnnnnnnnnnnnnnnnnnnnnnnnnnnnnnnnnnnnnnnnnnnnnnnnnnnnnnnnnnnnnnnnnnnnnnnnnnnnnnnnnnnnnnnnnnnnnnnnnnnnnnnnnnnnnnnnnnnnnnnnnnnnnnnnnnnnnnnnnnnnnnnnnnnnnnnnnnnnnnnnnnnnnnnnnnnnnnnnnnnnnnnnnnnnnnnnnnnnnnnnnnnnnnnnnnnnnnnnnnnnnnnnnnnnnnnnnnnnnnnnnnnnnnnnnnnnnnnnnnnnnnnnnnnnnnnnnnnnnnnnnnnnnnnnnnnnnnnnnnnnnnnnnnnnnnnnnnnnnnnnnnnnnnnnnnnnnnnnnnnnnnnnnnnnnnnnnnnnnnnnnnnnnnnnnnnnnnnnnnnnnnnnnnnnnnnnnnnnnnnnnnnnnnnnnnnnnnnnnnnnnnnnnnnnnnnnnnnnnnnnnnnnnnnnnnnnnnnnnnnnnnnnnnnnnnnnnnnnnnnnnnnnnnnnnnnnnnnnnnnnnnnnnnnnnnnnnnnnnnnnnnnnnnnnnnnnnnnnnnnnnnnnnnnnnnnnnnnnnnnnnnnnnnnnnnnnnnnnnnnnnnnnnnnnnnnnnnnnnnnnnnnnnnnnnnnnnnnnnnnnnnnnnnnnnnnnnnnnnnnnnnnnnnnnnnnnnnnnnnnnnnnnnnnnnnnnnnnnnnnnnnnnnnnnnnnnnnnnnnnnnnnnnnnnnnnnnnnnnnnnnnnnnnnnnnnnnnnnnnnnnnnnnnnnnnnnnnnnnnnnnnnnnnnnnnnnnnnnnnnnnnnnnnnnnnnnnnnnnnnnnnnnnnnnnnnnnnnnnnnnnnnnnnnnnnnnnnnnnnnnnnnnnnnnnnnnnnnnnnnnnnnnnnnnnnnnnnnnnnnnnnnnnnnnnnnnnnnnnnnnnnnnnnnnnnnnnnnnnnnnnnnnnnnnnnnnnnnnnnnnnnnnnnnnnnnnnnnnnnnnnnnnnnnnnnnnnnnnnnnnnnnnnnnnnnnnnnnnnnnnnnnnnnnnnnnnnnnnnnnnnnnnnnnnnnnnnnnnnnnnnnnnnnnnnnnnnnnnnnnnnnnnnnnnnnnnnnnnnnnnnnnnnnnnnnnnnnnnnnnnnnnnnnnnnnnnnnnnnnnnnnnnnnnnnnnnnnnnnnnnnnnnnnnnnnnnnnnnnnnnnnnnnnnnnnnnnnnnnnnnnnnnnnnnnnnnnnnnnnnnnnnnnnnnnnnnnnnnnnnnnnnnnnnnnnnnnnnnnnnnnnnnnnnnnnnnnnnnnnnnnnnnnnnnnnnnnnnnnnnnnnnnnnnnnnnnnnnnnnnnnnnnnnnnnnnnnnnnnnnnnnnnnnnnnnnnnnnnnnnnnnnnnnnnnnnnnnnnnnnnnnnnnnnnnnnnnnnnnnnnnnnnnnnnnnnnnnnnnnnnnnnnnnnnnnnnnnnnnnnnnnnnnnnnnnnnnnnnnnnnnnnnnnnnnnnnnnnnnnnnnnnnnnnnnnnnnnnnnnnnnnnnnnnnnnnnnnnnnnnnnnnnnnnnnnnnnnnnnnnnnnnnnnnnnnnnnnnnnnnnnnnnnnnnnnnnnnnnnnnnnnnnnnnnnnnnnnnnnnnnnnnnnnnnnnnnnnnnnnnnnnnnnnnnnnnnnnnnnnnnnnnnnnnnnnnnnnnnnnnnnnnnnnnnnnnnnnnnnnnnnnnnnnnnnnnnnnnnnnnnnnnnnnnnnnnnnnnnnnnnnnnnnnnnnnnnnnnnnnnnnnnnnnnnnnnnnnnnnnnnnnnnnnnnnnnnnnnnnnnnnnnnnnnnnnnnnnnnnnnnnnnnnnnnnnnnnnnnnnnnnnnnnnnnnnnnnnnnnnnnnnnnnnnnnnnnnnnnnnnnnnnnnnnnnnnnnnnnnnnnnnnnnnnnnnnnnnnnnnnnnnnnnnnnnnnnnnnnnnnnnnnnnnnnnnnnnnnnnnnnnnnnnnnnnnnnnnnnnnnnnnnnnnnnnnnnnnnnnnnnnnnnnnnnnnnnnnnnnnnnnnnnnnnnnnnnnnnnnnnnnnnnnnnnnnnnnnnnnnnnnnnnnnnnnnnnnnnnnnnnnnnnnnnnnnnnnnnnnnnnnnnnnnnnnnnnnnnnnnnnnnnnnnnnnnnnnnnnnnnnnnnnnnnnnnnnnnnnnnnnnnnnnnnnnnnnnnnnnnnnnnnnnnnnnnnnnnnnnnnnnnnnnnnnnnnnnnnnnnnnnnnnnnnnnnnnnnnnnnnnnnnnnnnnnnnnnnnnnnnnnnnnnnnnnnnnnnnnnnnnnnnnnnnnnnnnnnnnnnnnnnnnnnnnnnnnnnnnnnnnnnnnnnnnnnnnnnnnnnnnnnnnnnnnnnnnnnnnnnnnnnnnnnnnnnnnnnnnnnnnnnnnnnnnnnnnnnnnnnnnnnnnnnnnnnnnnnnnnnnnnnnnnnnnnnnnnnnnnnnnnnnnnnnnnnnnnnnnnnnnnnnnnnnnnnnnnnnnnnnnnnnnnnnnnnnnnnnnnnnnnnnnnnnnnnnnnnnnnnnnnnnnnnnnnnnnnnnnnnnnnnnnnnnnnnnnnnnnnnnnnnnnnnnnnnnnnnnnnnnnnnnnnnnnnnnnnnnnnnnnnnnnnnnnnnnnnnnnnnnnnnnnnnnnnnnnnnnnnnnnnnnnnnnnnnnnnnnnnnnnnnnnnnnnnnnnnnnnnnnnnnnnnnnnnnnnnnnnnnnnnnnnnnnnnnnnnnnnnnnnnnnnnnnnnnnnnnnnnnnnnnnnnnnnnnnnnnnnnnnnnnnnnnnnnnnnnnnnnnnnnnnnnnnnnnnnnnnnnnnnnnnnnnnnnnnnnnnnnnnnnnnnnnnnnnnnnnnnnnnnnnnnnnnnnnnnnnnnnnnnnnnnnnnnnnnnnnnnnnnnnnnnnnnnnnnnnnnnnnnnnnnnnnnnnnnnnnnnnnnnnnnnnnnnnnnnnnnnnnnnnnnnnnnnnnnnnnnnnnnnnnnnnnnnnnnnnnnnnnnnnnnnnnnnnnnnnnnnnnnnnnnnnnnnnnnnnnnnnnnnnnnnnnnnnnnnnnnnnnnnnnnnnnnnnnnnnnnnnnnnnnnnnnnnnnnnnnnnnnnnnnnnnnnnnnnnnnnnnnnnnnnnnnnnnnnnnnnnnnnnnnnnnnnnnnnnnnnnnnnnnnnnnnnnnnnnnnnnnnnnnnnnnnnnnnnnnnnnnnnnnnnnnnnnnnnnnnnnnnnnnnnnnnnnnnnnnnnnnnnnnnnnnnnnnnnnnnnnnnnnnnnnnnnnnnnnnnnnnnnnnnnnnnnnnnnnnnnnnnnnnnnnnnnnnnnnnnnnnnnnnnnnnnnnnnnnnnnnnnnnnnnnnnnnnnnnnnnnnnnnnnnnnnnnnnnnnnnnnnnnnnnnnnnnnnnnnnnnnnnnnnnnnnnnnnnnnnnnnnnnnnnnnnnnnnnnnnnnnnnnnnnnnnnnnnnnnnnnnnnnnnnnnnnnnnnnnnnnnnnnnnnnnnnnnnnnnnnnnnnnnnnnnnnnnnnnnnnnnnnnnnnnnnnnnnnnnnnnnnnnnnnnnnnnnnnnnnnnnnnnnnnnnnnnnnnnnnnnnnnnnnnnnnnnnnnnnnnnnnnnnnnnnnnnnnnnnnnnnnnnnnnnnnnnnnnnnnnnnnnnnnnnnnnnnnnnnnnnnnnnnnnnnnnnnnnnnnnnnnnnnnnnnnnnnnnnnnnnnnnnnnnnnnnnnnnnnnnnnnnnnnnnnnnnnnnnnnnnnnnnnnnnnnnnnnnnnnnnnnnnnnnnnnnnnnnnnnnnnnnnnnnnnnnnnnnnnnnnnnnnnnnnnnnnnnnnnnnnnnnnnnnnnnnnnnnnnnnnnnnnnnnnnnnnnnnnnnnnnnnnnnnnnnnnnnnnnnnnnnnnnnnnnnnnnnnnnnnnnnnnnnnnnnnnnnnnnnnnnnnnnnnnnnnnnnnnnnnnnnnnnnnnnnnnnnnnnnnnnnnnnnnnnnnnnnnnnnnnnnnnnnnnnnnnnnnnnnnnnnnnnnnnnnnnnnnnnnnnnnnnnnnnnnnnnnnnnnnnnnnnnnnnnnnnnnnnnnnnnnnnnnnnnnnnnnnnnnnnnnnnnnnnnnnnnnnnnnnnnnnnnnnnnnnnnnnnnnnnnnnnnnnnnnnnnnnnnnnnnnnnnnnnnnnnnnnnnnnnnnnnnnnnnnnnnnnnnnnnnnnnnnnnnnnnnnnnnnnnnnnnnnnnnnnnnnnnnnnnnnnnnnnnnnnnnnnnnnnnnnnnnnnnnnnnnnnnnnnnnnnnnnnnnnnnnnnnnnnnnnnnnnnnnnnnnnnnnnnnnnnnnnnnnnnnnnnnnnnnnnnnnnnnnnnnnnnnnnnnnnnnnnnnnnnnnnnnnnnnnnnnnnnnnnnnnnnnnnnnnnnnnnnnnnnnnnnnnnnnnnnnnnnnnnnnnnnnnnnnnnnnnnnnnnnnnnnnnnnnnnnnnnnnnnnnnnnnnnnnnnnnnnnnnnnnnnnnnnnnnnnnnnnnnnnnnnnnnnnnnnnnnnnnnnnnnnnnnnnnnnnnnnnnnnnnnnnnnnnnnnnnnnnnnnnnnnnnnnnnnnnnnnnnnnnnnnnnnnnnnnnnnnnnnnnnnnnnnnnnnnnnnnnnnnnnnnnnnnnnnnnnnnnnnnnnnnnnnnnnnnnnnnnnnnnnnnnnnnnnnnnnnnnnnnnnnnnnnnnnnnnnnnnnnnnnnnnnnnnnnnnnnnnnnnnnnnnnnnnnnnnnnnnnnnnnnnnnnnnnnnnnnnnnnnnnnnnnnnnnnnnnnnnnnnnnnnnnnnnnnnnnnnnnnnnnnnnnnnnnnnnnnnnnnnnnnnnnnnnnnnnnnnnnnnnnnnnnnnnnnnnnnnnnnnnnnnnnnnnnnnnnnnnnnnnnnnnnnnnnnnnnnnnnnnnnnnnnnnnnnnnnnnnnnnnnnnnnnnnnnnnnnnnnnnnnnnnnnnnnnnnnnnnnnnnnnnnnnnnnnnnnnnnnnnnnnnnnnnnnnnnnnnnnnnnnnnnnnnnnnnnnnnnnnnnnnnnnnnnnnnnnnnnnnnnnnnnnnnnnnnnnnnnnnnnnnnnnnnnnnnnnnnnnnnnnnnnnnnnnnnnnnnnnnnnnnnnnnnnnnnnnnnnnnnnnnnnnnnnnnnnnnnnnnnnnnnnnnnnnnnnnnnnnnnnnnnnnnnnnnnnnnnnnnnnnnnnnnnnnnnnnnnnnnnnnnnnnnnnnnnnnnnnnnnnnnnnnnnnnnnnnnnnnnnnnnnnnnnnnnnnnnnnnnnnnnnnnnnnnnnnnnnnnnnnnnnnnnnnnnnnnnnnnnnnnnnnnnnnnnnnnnnnnnnnnnnnnnnnnnnnnnnnnnnnnnnnnnnnnnnnnnnnnnnnnnnnnnnnnnnnnnnnnnnnnnnnnnnnnnnnnnnnnnnnnnnnnnnnnnnnnnnnnnnnnnnnnnnnnnnnnnnnnnnnnnnnnnnnnnnnnnnnnnnnnnnnnnnnnnnnnnnnnnnnnnnnnnnnnnnnnnnnnnnnnnnnnnnnnnnnnnnnnnnnnnnnnnnnnnnnnnnnnnnnnnnnnnnnnnnnnnnnnnnnnnnnnnnnnnnnnnnnnnnnnnnnnnnnnnnnnnnnnnnnnnnnnnnnnnnnnnnnnnnnnnnnnnnnnnnnnnnnnnnnnnnnnnnnnnnnnnnnnnnnnnnnnnnnnnnnnnnnnnnnnnnnnnnnnnnnnnnnnnnnnnnnnnnnnnnnnnnnnnnnnnnnnnnnnnnnnnnnnnnnnnnnnnnnnnnnnnnnnnnnnnnnnnnnnnnnnnnnnnnnnnnnnnnnnnnnnnnnnnnnnnnnnnnnnnnnnnnnnnnnnnnnnnnnnnnnnnnnnnnnnnnnnnnnnnnnnnnnnnnnnnnnnnnnnnnnnnnnnnnnnnnnnnnnnnnnnnnnnnnnnnnnnnnnnnnnnnnnnnnnnnnnnnnnnnnnnnnnnnnnnnnnnnnnnnnnnnnnnnnnnnnnnnnnnnnnnnnnnnnnnnnnnnnnnnnnnnnnnnnnnnnnnnnnnnnnnnnnnnnnnnnnnnnnnnnnnnnnnnnnnnnnnnnnnnnnnnnnnnnnnnnnnnnnnnnnnnnnnnnnnnnnnnnnnnnnnnnnnnnnnnnnnnnnnnnnnnnnnnnnnnnnnnnnnnnnnnnnnnnnnnnnnnnnnnnnnnnnnnnnnnnnnnnnnnnnnnnnnnnnnnnnnnnnnnnnnnnnnnnnnnnnnnnnnnnnnnnnnnnnnnnnnnnnnnnnnnnnnnnnnnnnnnnnnnnnnnnnnnnnnnnnnnnnnnnnnnnnnnnnnnnnnnnnnnnnnnnnnnnnnnnnnnnnnnnnnnnnnnnnnnnnnnnnnnnnnnnnnnnnnnnnnnnnnnnnnnnnnnnnnnnnnnnnnnnnnnnnnnnnnnnnnnnnnnnnnnnnnnnnnnnnnnnnnnnnnnnnnnnnnnnnnnnnnnnnnnnnnnnnnnnnnnnnnnnnnnnnnnnnnnnnnnnnnnnnnnnnnnnnnnnnnnnnnnnnnnnnnnnnnnnnnnnnnnnnnnnnnnnnnnnnnnnnnnnnnnnnnnnnnnnnnnnnnnnnnnnnnnnnnnnnnnnnnnnnnnnnnnnnnnnnnnnnnnnnnnnnnnnnnnnnnnnnnnnnnnnnnnnnnnnnnnnnnnnnnnnnnnnnnnnnnnnnnnnnnnnnnnnnnnnnnnnnnnnnnnnnnnnnnnnnnnnnnnnnnnnnnnnnnnnnnnnnnnnnnnnnnnnnnnnnnnnnnnnnnnnnnnnnnnnnnnnnnnnnnnnnnnnnnnnnnnnnnnnnnnnnnnnnnnnnnnnnnnnnnnnnnnnnnnnnnnnnnnnnnnnnnnnnnnnnnnnnnnnnnnnnnnnnnnnnnnnnnnnnnnnnnnnnnnnnnnnnnnnnnnnnnnnnnnnnnnnnnnnnnnnnnnnnnnnnnnnnnnnnnnnnnnnnnnnnnnnnnnnnnnnnnnnnnnnnnnnnnnnnnnnnnnnnnnnnnnnnnnnnnnnnnnnnnnnnnnnnnnnnnnnnnnnnnnnnnnnnnnnnnnnnnnnnnnnnnnnnnnnnnnnnnnnnnnnnnnnnnnnnnnnnnnnnnnnnnnnnnnnnnnnnnnnnnnnnnnnnnnnnnnnnnnnnnnnnnnnnnnnnnnnnnnnnnnnnnnnnnnnnnnnnnnnnnnnnnnnnnnnnnnnnnnnnnnnnnnnnnnnnnnnnnnnnnnnnnnnnnnnnnnnnnnnnnnnnnnnnnnnnnnnnnnnnnnnnnnnnnnnnnnnnnnnnnnnnnnnnnnnnnnnnnnnnnnnnnnnnnnnnnnnnnnnnnnnnnnnnnnnnnnnnnnnnnnnnnnnnnnnnnnnnnnnnnnnnnnnnnnnnnnnnnnnnnnnnnnnnnnnnnnnnnnnnnnnnnnnnnnnnnnnnnnnnnnnnnnnnnnnnnnnnnnnnnnnnnnnnnnnnnnnnnnnnnnnnnnnnnnnnnnnnnnnnnnnnnnnnnnnnnnnnnnnnnnnnnnnnnnnnnnnnnnnnnnnnnnnnnnnnnnnnnnnnnnnnnnnnnnnnnnnnnnnnnnnnnnnnnnnnnnnnnnnnnnnnnnnnnnnnnnnnnnnnnnnnnnnnnnnnnnnnnnnnnnnnnnnnnnnnnnnnnnnnnnnnnnnnnnnnnnnnnnnnnnnnnnnnnnnnnnnnnnnnnnnnnnnnnnnnnnnnnnnnnnnnnnnnnnnnnnnnnnnnnnnnnnnnnnnnnnnnnnnnnnnnnnnnnnnnnnnnnnnnnnnnnnnnnnnnnnnnnnnnnnnnnnnnnnnnnnnnnnnnnnnnnnnnnnnnnnnnnnnnnnnnnnnnnnnnnnnnnnnnnnnnnnnnnnnnnnnnnnnnnnnnnnnnnnnnnnnnnnnnnnnnnnnnnnnnnnnnnnnnnnnnnnnnnnnnnnnnnnnnnnnnnnnnnnnnnnnnnnnnnnnnnnnnnnnnnnnnnnnnnnnnnnnnnnnnnnnnnnnnnnnnnnnnnnnnnnnnnnnnnnnnnnnnnnnnnnnnnnnnnnnnnnnnnnnnnnnnnnnnnnnnnnnnnnnnnnnnnnnnnnnnnnnnnnnnnnnnnnnnnnnnnnnnnnnnnnnnnnnnnnnnnnnnnnnnnnnnnnnnnnnnnnnnnnnnnnnnnnnnnnnnnnnnnnnnnnnnnnnnnnnnnnnnnnnnnnnnnnnnnnnnnnnnnnnnnnnnnnnnnnnnnnnnnnnnnnnnnnnnnnnnnnnnnnnnnnnnnnnnnnnnnnnnnnnnnnnnnnnnnnnnnnnnnnnnnnnnnnnnnnnnnnnnnnnnnnnnnnnnnnnnnnnnnnnnnnnnnnnnnnnnnnnnnnnnnnnnnnnnnnnnnnnnnnnnnnnnnnnnnnnnnnnnnnnnnnnnnnnnnnnnnnnnnnnnnnnnnnnnnnnnnnnnnnnnnnnnnnnnnnnnnnnnnnnnnnnnnnnnnnnnnnnnnnnnnnnnnnnnnnnnnnnnnnnnnnnnnnnnnnnnnnnnnnnnnnnnnnnnnnnnnnnnnnnnnnnnnnnnnnnnnnnnnnnnnnnnnnnnnnnnnnnnnnnnnnnnnnnnnnnnnnnnnnnnnnnnnnnnnnnnnnnnnnnnnnnnnnnnnnnnnnnnnnnnnnnnnnnnnnnnnnnnnnnnnnnnnnnnnnnnnnnnnnnnnnnnnnnnnnnnnnnnnnnnnnnnnnnnnnnnnnnnnnnnnnnnnnnnnnnnnnnnnnnnnnnnnnnnnnnnnnnnnnnnnnnnnnnnnnnnnnnnnnnnnnnnnnnnnnnnnnnnnnnnnnnnnnnnnnnnnnnnnnnnnnnnnnnnnnnnnnnnnnnnnnnnnnnnnnnnnnnnnnnnnnnnnnnnnnnnnnnnnnnnnnnnnnnnnnnnnnnnnnnnnnnnnnnnnnnnnnnnnnnnnnnnnnnnnnnnnnnnnnnnnnnnnnnnnnnnnnnnnnnnnnnnnnnnnnnnnnnnnnnnnnnnnnnnnnnnnnnnnnnnnnnnnnnnnnnnnnnnnnnnnnnnnnnnnnnnnnnnnnnnnnnnnnnnnnnnnnnnnnnnnnnnnnnnnnnnnnnnnnnnnnnnnnnnnnnnnnnnnnnnnnnnnnnnnnnnnnnnnnnnnnnnnnnnnnnnnnnnnnnnnnnnnnnnnnnnnnnnnnnnnnnnnnnnnnnnnnnnnnnnnnnnnnnnnnnnnnnnnnnnnnnnnnnnnnnnnnnnnnnnnnnnnnnnnnnnnnnnnnnnnnnnnnnnnnnnnnnnnnnnnnnnnnnnnnnnnnnnnnnnnnnnnnnnnnnnnnnnnnnnnnnnnnnnnnnnnnnnnnnnnnnnnnnnnnnnnnnnnnnnnnnnnnnnnnnnnnnnnnnnnnnnnnnnnnnnnnnnnnnnnnnnnnnnnnnnnnnnnnnnnnnnnnnnnnnnnnnnnnnnnnnnnnnnnnnnnnnnnnnnnnnnnnnnnnnnnnnnnnnnnnnnnnnnnnnnnnnnnnnnnnnnnnnnnnnnnnnnnnnnnnnnnnnnnnnnnnnnnnnnnnnnnnnnnnnnnnnnnnnnnnnnnnnnnnnnnnnnnnnnnnnnnnnnnnnnnnnnnnnnnnnnnnnnnnnnnnnnnnnnnnnnnnnnnnnnnnnnnnnnnnnnnnnnnnnnnnnnnnnnnnnnnnnnnnnnnnnnnnnnnnnnnnnnnnnnnnnnnnnnnnnnnnnnnnnnnnnnnnnnnnnnnnnnnnnnnnnnnnnnnnnnnnnnnnnnnnnnnnnnnnnnnnnnnnnnnnnnnnnnnnnnnnnnnnnnnnnnnnnnnnnnnnnnnnnnnnnnnnnnnnnnnnnnnnnnnnnnnnnnnnnnnnnnnnnnnnnnnnnnnnnnnnnnnnnnnnnnnnnnnnnnnnnnnnnnnnnnnnnnnnnnnnnnnnnnnnnnnnnnnnnnnnnnnnnnnnnnnnnnnnnnnnnnnnnnnnnnnnnnnnnnnnnnnnnnnnnnnnnnnnnnnnnnnnnnnnnnnnnnnnnnnnnnnnnnnnnnnnnnnnnnnnnnnnnnnnnnnnnnnnnnnnnnnnnnnnnnnnnnnnnnnnnnnnnnnnnnnnnnnnnnnnnnnnnnnnnnnnnnnnnnnnnnnnnnnnnnnnnnnnnnnnnnnnnnnnnnnnnnnnnnnnnnnnnnnnnnnnnnnnnnnnnnnnnnnnnnnnnnnnnnnnnnnnnnnnnnnnnnnnnnnnnnnnnnnnnnnnnnnnnnnnnnnnnnnnnnnnnnnnnnnnnnnnnnnnnnnnnnnnnnnnnnnnnnnnnnnnnnnnnnnnnnnnnnnnnnnnnnnnnnnnnnnnnnnnnnnnnnnnnnnnnnnnnnnnnnnnnnnnnnnnnnnnnnnnnnnnnnnnnnnnnnnnnnnnnnnnnnnnnnnnnnnnnnnnnnnnnnnnnnnnnnnnnnnnnnnnnnnnnnnnnnnnnnnnnnnnnnnnnnnnnnnnnnnnnnnnnnnnnnnnnnnnnnnnnnnnnnnnnnnnnnnnnnnnnnnnnnnnnnnnnnnnnnnnnnnnnnnnnnnnnnnnnnnnnnnnnnnnnnnnnnnnnnnnnnnnnnnnnnnnnnnnnnnnnnnnnnnnnnnnnnnnnnnnnnnnnnnnnnnnnnnnnnnnnnnnnnnnnnnnnnnnnnnnnnnnnnnnnnnnnnnnnnnnnnnnnnnnnnnnnnnnnnnnnnnnnnnnnnnnnnnnnnnnnnnnnnnnnnnnnnnnnnnnnnnnnnnnnnnnnnnnnnnnnnnnnnnnnnnnnnnnnnnnnnnnnnnnnnnnnnnnnnnnnnnnnnnnnnnnnnnnnnnnnnnnnnnnnnnnnnnnnnnnnnnnnnnnnnnnnnnnnnnnnnnnnnnnnnnnnnnnnnnnnnnnnnnnnnnnnnnnnnnnnnnnnnnnnnnnnnnnnnnnnnnnnnnnnnnnnnnnnnnnnnnnnnnnnnnnnnnnnnnnnnnnnnnnnnnnnnnnnnnnnnnnnnnnnnnnnnnnnnnnnnnnnnnnnnnnnnnnnnnnnnnnnnnnnnnnnnnnnnnnnnnnnnnnnnnnnnnnnnnnnnnnnnnnnnnnnnnnnnnnnnnnnnnnnnnnnnnnnnnnnnnnnnnnnnnnnnnnnnnnnnnnnnnnnnnnnnnnnnnnnnnnnnnnnnnnnnnnnnnnnnnnnnnnnnnnnnnnnnnnnnnnnnnnnnnnnnnnnnnnnnnnnnnnnnnnnnnnnnnnnnnnnnnnnnnnnnnnnnnnnnnnnnnnnnnnnnnnnnnnnnnnnnnnnnnnnnnnnnnnnnnnnnnnnnnnnnnnnnnnnnnnnnnnnnnnnnnnnnnnnnnnnnnnnnnnnnnnnnnnnnnnnnnnnnnnnnnnnnnnnnnnnnnnnnnnnnnnnnnnnnnnnnnnnnnnnnnnnnnnnnnnnnnnnnnnnnnnnnnnnnnnnnnnnnnnnnnnnnnnnnnnnnnnnnnnnnnnnnnnnnnnnnnnnnnnnnnnnnnnnnnnnnnnnnnnnnnnnnnnnnnnnnnnnnnnnnnnnnnnnnnnnnnnnnnnnnnnnnnnnnnnnnnnnnnnnnnnnnnnnnnnnnnnnnnnnnnnnnnnnnnnnnnnnnnnnnnnnnnnnnnnnnnnnnnnnnnnnnnnnnnnnnnnnnnnnnnnnnnnnnnnnnnnnnnnnnnnnnnnnnnnnnnnnnnnnnnnnnnnnnnnnnnnnnnnnnnnnnnnnnnnnnnnnnnnnnnnnnnnnnnnnnnnnnnnnnnnnnnnnnnnnnnnnnnnnnnnnnnnnnnnnnnnnnnnnnnnnnnnnnnnnnnnnnnnnnnnnnnnnnnnnnnnnnnnnnnnnnnnnnnnnnnnnnnnnnnnnnnnnnnnnnnnnnnnnnnnnnnnnnnnnnnnnnnnnnnnnnnnnnnnnnnnnnnnnnnnnnnnnnnnnnnnnnnnnnnnnnnnnnnnnnnnnnnnnnnnnnnnnnnnnnnnnnnnnnnnnnnnnnnnnnnnnnnnnnnnnnnnnnnnnnnnnnnnnnnnnnnnnnnnnnnnnnnnnnnnnnnnnnnnnnnnnnnnnnnnnnnnnnnnnnnnnnnnnnnnnnnnnnnnnnnnnnnnnnnnnnnnnnnnnnnnnnnnnnnnnnnnnnnnnnnnnnnnnnnnnnnnnnnnnnnnnnnnnnnnnnnnnnnnnnnnnnnnnnnnnnnnnnnnnnnnnnnnnnnnnnnnnnnnnnnnnnnnnnnnnnnnnnnnnnnnnnnnnnnnnnnnnnnnnnnnnnnnnnnnnnnnnnnnnnnnnnnnnnnnnnnnnnnnnnnnnnnnnnnnnnnnnnnnnnnnnnnnnnnnnnnnnnnnnnnnnnnnnnnnnnnnnnnnnnnnnnnnnnnnnnnnnnnnnnnnnnnnnnnnnnnnnnnnnnnnnnnnnnnnnnnnnnnnnnnnnnnnnnnnnnnnnnnnnnnnnnnnnnnnnnnnnnnnnnnnnnnnnnnnnnnnnnnnnnnnnnnnnnnnnnnnnnnnnnnnnnnnnnnnnnnnnnnnnnnnnnnnnnnnnnnnnnnnnnnnnnnnnnnnnnnnnnnnnnnnnnnnnnnnnnnnnnnnnnnnnnnnnnnnnnnnnnnnnnnnnnnnnnnnnnnnnnnnnnnnnnnnnnnnnnnnnnnnnnnnnnnnnnnnnnnnnnnnnnnnnnnnnnnnnnnnnnnnnnnnnnnnnnnnnnnnnnnnnnnnnnnnnnnnnnnnnnnnnnnnnnnnnnnnnnnnnnnnnnnnnnnnnnnnnnnnnnnnnnnnnnnnnnnnnnnnnnnnnnnnnnnnnnnnnnnnnnnnnnnnnnnnnnnnnnnnnnnnnnnnnnnnnnnnnnnnnnnnnnnnnnnnnnnnnnnnnnnnnnnnnnnnnnnnnnnnnnnnnnnnnnnnnnnnnnnnnnnnnnnnnnnnnnnnnnnnnnnnnnnnnnnnnnnnnnnnnnnnnnnnnnnnnnnnnnnnnnnnnnnnnnnnnnnnnnnnnnnnnnnnnnnnnnnnnnnnnnnnnnnnnnnnnnnnnnnnnnnnnnnnnnnnnnnnnnnnnnnnnnnnnnnnnnnnnnnnnnnnnnnnnnnnnnnnnnnnnnnnnnnnnnnnnnnnnnnnnnnnnnnnnnnnnnnnnnnnnnnnnnnnnnnnnnnnnnnnnnnnnnnnnnnnnnnnnnnnnnnnnnnnnnnnnnnnnnnnnnnnnnnnnnnnnnnnnnnnnnnnnnnnnnnnnnnnnnnnnnnnnnnnnnnnnnnnnnnnnnnnnnnnnnnnnnnnnnnnnnnnnnnnnnnnnnnnnnnnnnnnnnnnnnnnnnnnnnnnnnnnnnnnnnnnnnnnnnnnnnnnnnnnnnnnnnnnnnnnnnnnnnnnnnnnnnnnnnnnnnnnnnnnnnnnnnnnnnnnnnnnnnnnnnnnnnnnnnnnnnnnnnnnnnnnnnnnnnnnnnnnnnnnnnnnnnnnnnnnnnnnnnnnnnnnnnnnnnnnnnnnnnnnnnnnnnnnnnnnnnnnnnnnnnnnnnnnnnnnnnnnnnnnnnnnnnnnnnnnnnnnnnnnnnnnnnnnnnnnnnnnnnnnnnnnnnnnnnnnnnnnnnnnnnnnnnnnnnnnnnnnnnnnnnnnnnnnnnnnnnnnnnnnnnnnnnnnnnnnnnnnnnnnnnnnnnnnnnnnnnnnnnnnnnnnnnnnnnnnnnnnnnnnnnnnnnnnnnnnnnnnnnnnnnnnnnnnnnnnnnnnnnnnnnnnnnnnnnnnnnnnnnnnnnnnnnnnnnnnnnnnnnnnnnnnnnnnnnnnnnnnnnnnnnnnnnnnnnnnnnnnnnnnnnnnnnnnnnnnnnnnnnnnnnnnnnnnnnnnnnnnnnnnnnnnnnnnnnnnnnnnnnnnnnnnnnnnnnnnnnnnnnnnnnnnnnnnnnnnnnnnnnnnnnnnnnnnnnnnnnnnnnnnnnnnnnnnnnnnnnnnnnnnnnnnnnnnnnnnnnnnnnnnnnnnnnnnnnnnnnnnnnnnnnnnnnnnnnnnnnnnnnnnnnnnnnnnnnnnnnnnnnnnnnnnnnnnnnnnnnnnnnnnnnnnnnnnnnnnnnnnnnnnnnnnnnnnnnnnnnnnnnnnnnnnnnnnnnnnnnnnnnnnnnnnnnnnnnnnnnnnnnnnnnnnnnnnnnnnnnnnnnnnnnnnnnnnnnnnnnnnnnnnnnnnnnnnnnnnnnnnnnnnnnnnnnnnnnnnnnnnnnnnnnnnnnnnnnnnnnnnnnnnnnnnnnnnnnnnnnnnnnnnnnnnnnnnnnnnnnnnnnnnnnnnnnnnnnnnnnnnnnnnnnnnnnnnnnnnnnnnnnnnnnnnnnnnnnnnnnnnnnnnnnnnnnnnnnnnnnnnnnnnnnnnnnnnnnnnnnnnnnnnnnnnnnnnnnnnnnnnnnnnnnnnnnnnnnnnnnnnnnnnnnnnnnnnnnnnnnnnnnnnnnnnnnnnnnnnnnnnnnnnnnnnnnnnnnnnnnnnnnnnnnnnnnnnnnnnnnnnnnnnnnnnnnnnnnnnnnnnnnnnnnnnnnnnnnnnnnnnnnnnnnnnnnnnnnnnnnnnnnnnnnnnnnnnnnnnnnnnnnnnnnnnnnnnnnnnnnnnnnnnnnnnnnnnnnnnnnnnnnnnnnnnnnnnnnnnnnnnnnnnnnnnnnnnnnnnnnnnnnnnnnnnnnnnnnnnnnnnnnnnnnnnnnnnnnnnnnnnnnnnnnnnnnnnnnnnnnnnnnnnnnnnnnnnnnnnnnnnnnnnnnnnnnnnnnnnnnnnnnnnnnnnnnnnnnnnnnnnnnnnnnnnnnnnnnnnnnnnnnnnnnnnnnnnnnnnnnnnnnnnnnnnnnnnnnnnnnnnnnnnnnnnnnnnnnnnnnnnnnnnnnnnnnnnnnnnnnnnnnnnnnnnnnnnnnnnnnnnnnnnnnnnnnnnnnnnnnnnnnnnnnnnnnnnnnnnnnnnnnnnnnnnnnnnnnnnnnnnnnnnnnnnnnnnnnnnnnnnnnnnnnnnnnnnnnnnnnnnnnnnnnnnnnnnnnnnnnnnnnnnnnnnnnnnnnnnnnnnnnnnnnnnnnnnnnnnnnnnnnnnnnnnnnnnnnnnnnnnnnnnnnnnnnnnnnnnnnnnnnnnnnnnnnnnnnnnnnnnnnnnnnnnnnnnnnnnnnnnnnnnnnnnnnnnnnnnnnnnnnnnnnnnnnnnnnnnnnnnnnnnnnnnnnnnnnnnnnnnnnnnnnnnnnnnnnnnnnnnnnnnnnnnnnnnnnnnnnnnnnnnnnnnnnnnnnnnnnnnnnnnnnnnnnnnnnnnnnnnnnnnnnnnnnnnnnnnnnnnnnnnnnnnnnnnnnnnnnnnnnnnnnnnnnnnnnnnnnnnnnnnnnnnnnnnnnnnnnnnnnnnnnnnnnnnnnnnnnnnnnnnnnnnnnnnnnnnnnnnnnnnnnnnnnnnnnnnnnnnnnnnnnnnnnnnnnnnnnnnnnnnnnnnnnnnnnnnnnnnnnnnnnnnnnnnnnnnnnnnnnnnnnnnnnnnnnnnnnnnnnnnnnnnnnnnnnnnnnnnnnnnnnnnnnnnnnnnnnnnnnnnnnnnnnnnnnnnnnnnnnnnnnnnnnnnnnnnnnnnnnnnnnnnnnnnnnnnnnnnnnnnnnnnnnnnnnnnnnnnnnnnnnnnnnnnnnnnnnnnnnnnnnnnnnnnnnnnnnnnnnnnnnnnnnnnnnnnnnnnnnnnnnnnnnnnnnnnnnnnnnnnnnnnnnnnnnnnnnnnnnnnnnnnnnnnnnnnnnnnnnnnnnnnnnnnnnnnnnnnnnnnnnnnnnnnnnnnnnnnnnnnnnnnnnnnnnnnnnnnnnnnnnnnnnnnnnnnnnnnnnnnnnnnnnnnnnnnnnnnnnnnnnnnnnnnnnnnnnnnnnnnnnnnnnnnnnnnnnnnnnnnnnnnnnnnnnnnnnnnnnnnnnnnnnnnnnnnnnnnnnnnnnnnnnnnnnnnnnnnnnnnnnnnnnnnnnnnnnnnnnnnnnnnnnnnnnnnnnnnnnnnnnnnnnnnnnnnnnnnnnnnnnnnnnnnnnnnnnnnnnnnnnnnnnnnnnnnnnnnnnnnnnnnnnnnnnnnnnnnnnnnnnnnnnnnnnnnnnnnnnnnnnnnnnnnnnnnnnnnnnnnnnnnnnnnnnnnnnnnnnnnnnnnnnnnnnnnnnnnnnnnnnnnnnnnnnnnnnnnnnnnnnnnnnnnnnnnnnnnnnnnnnnnnnnnnnnnnnnnnnnnnnnnnnnnnnnnnnnnnnnnnnnnnnnnnnnnnnnnnnnnnnnnnnnnnnnnnnnnnnnnnnnnnnnnnnnnnnnnnnnnnnnnnnnnnnnnnnnnnnnnnnnnnnnnnnnnnnnnnnnnnnnnnnnnnnnnnnnnnnnnnnnnnnnnnnnnnnnnnnnnnnnnnnnnnnnnnnnnnnnnnnnnnnnnnnnnnnnnnnnnnnnnnnnnnnnnnnnnnnnnnnnnnnnnnnnnnnnnnnnnnnnnnnnnnnnnnnnnnnnnnnnnnnnnnnnnnnnnnnnnnnnnnnnnnnnnnnnnnnnnnnnnnnnnnnnnnnnnnnnnnnnnnnnnnnnnnnnnnnnnnnnnnnnnnnnnnnnnnnnnnnnnnnnnnnnnnnnnnnnnnnnnnnnnnnnnnnnnnnnnnnnnnnnnnnnnnnnnnnnnnnnnnnnnnnnnnnnnnnnnnnnnnnnnnnnnnnnnnnnnnnnnnnnnnnnnnnnnnnnnnnnnnnnnnnnnnnnnnnnnnnnnnnnnnnnnnnnnnnnnnnnnnnnnnnnnnnnnnnnnnnnnnnnnnnnnnnnnnnnnnnnnnnnnnnnnnnnnnnnnnnnnnnnnnnnnnnnnnnnnnnnnnnnnnnnnnnnnnnnnnnnnnnnnnnnnnnnnnnnnnnnnnnnnnnnnnnnnnnnnnnnnnnnnnnnnnnnnnnnnnnnnnnnnnnnnnnnnnnnnnnnnnnnnnnnnnnnnnnnnnnnnnnnnnnnnnnnnnnnnnnnnnnnnnnnnnnnnnnnnnnnnnnnnnnnnnnnnnnnnnnnnnnnnnnnnnnnnnnnnnnnnnnnnnnnnnnnnnnnnnnnnnnnnnnnnnnnnnnnnnnnnnnnnnnnnnnnnnnnnnnnnnnnnnnnnnnnnnnnnnnnnnnnnnnnnnnnnnnnnnnnnnnnnnnnnnnnnnnnnnnnnnnnnnnnnnnnnnnnnnnnnnnnnnnnnnnnnnnnnnnnnnnnnnnnnnnnnnnnnnnnnnnnnnnnnnnnnnnnnnnnnnnnnnnnnnnnnnnnnnnnnnnnnnnnnnnnnnnnnnnnnnnnnnnnnnnnnnnnnnnnnnnnnnnnnnnnnnnnnnnnnnnnnnnnnnnnnnnnnnnnnnnnnnnnnnnnnnnnnnnnnnnnnnnnnnnnnnnnnnnnnnnnnnnnnnnnnnnnnnnnnnnnnnnnnnnnnnnnnnnnnnnnnnnnnnnnnnnnnnnnnnnnnnnnnnnnnnnnnnnnnnnnnnnnnnnnnnnnnnnnnnnnnnnnnnnnnnnnnnnnnnnnnnnnnnnnnnnnnnnnnnnnnnnnnnnnnnnnnnnnnnnnnnnnnnnnnnnnnnnnnnnnnnnnnnnnnnnnnnnnnnnnnnnnnnnnnnnnnnnnnnnnnnnnnnnnnnnnnnnnnnnnnnnnnnnnnnnnnnnnnnnnnnnnnnnnnnnnnnnnnnnnnnnnnnnnnnnnnnnnnnnnnnnnnnnnnnnnnnnnnnnnnnnnnnnnnnnnnnnnnnnnnnnnnnnnnnnnnnnnnnnnnnnnnnnnnnnnnnnnnnnnnnnnnnnnnnnnnnnnnnnnnnnnnnnnnnnnnnnnnnnnnnnnnnnnnnnnnnnnnnnnnnnnnnnnnnnnnnnnnnnnnnnnnnnnnnnnnnnnnnnnnnnnnnnnnnnnnnnnnnnnnnnnnnnnnnnnnnnnnnnnnnnnnnnnnnnnnnnnnnnnnnnnnnnnnnnnnnnnnnnnnnnnnnnnnnnnnnnnnnnnnnnnnnnnnnnnnnnnnnnnnnnnnnnnnnnnnnnnnnnnnnnnnnnnnnnnnnnnnnnnnnnnnnnnnnnnnnnnnnnnnnnnnnnnnnnnnnnnnnnnnnnnnnnnnnnnnnnnnnnnnnnnnnnnnnnnnnnnnnnnnnnnnnnnnnnnnnnnnnnnnnnnnnnnnnnnnnnnnnnnnnnnnnnnnnnnnnnnnnnnnnnnnnnnnnnnnnnnnnnnnnnnnnnnnnnnnnnnnnnnnnnnnnnnnnnnnnnnnnnnnnnnnnnnnnnnnnnnnnnnnnnnnnnnnnnnnnnnnnnnnnnnnnnnnnnnnnnnnnnnnnnnnnnnnnnnnnnnnnnnnnnnnnnnnnnnnnnnnnnnnnnnnnnnnnnnnnnnnnnnnnnnnnnnnnnnnnnnnnnnnnnnnnnnnnnnnnnnnnnnnnnnnnnnnnnnnnnnnnnnnnnnnnnnnnnnnnnnnnnnnnnnnnnnnnnnnnnnnnnnnnnnnnnnnnnnnnnnnnnnnnnnnnnnnnnnnnnnnnnnnnnnnnnnnnnnnnnnnnnnnnnnnnnnnnnnnnnnnnnnnnnnnnnnnnnnnnnnnnnnnnnnnnnnnnnnnnnnnnnnnnnnnnnnnnnnnnnnnnnnnnnnnnnnnnnnnnnnnnnnnnnnnnnnnnnnnnnnnnnnnnnnnnnnnnnnnnnnnnnnnnnnnnnnnnnnnnnnnnnnnnnnnnnnnnnnnnnnnnnnnnnnnnnnnnnnnnnnnnnnnnnnnnnnnnnnnnnnnnnnnnnnnnnnnnnnnnnnnnnnnnnnnnnnnnnnnnnnnnnnnnnnnnnnnnnnnnnnnnnnnnnnnnnnnnnnnnnnnnnnnnnnnnnnnnnnnnnnnnnnnnnnnnnnnnnnnnnnnnnnnnnnnnnnnnnnnnnnnnnnnnnnnnnnnnnnnnnnnnnnnnnnnnnnnnnnnnnnnnnnnnnnnnnnnnnnnnnnnnnnnnnnnnnnnnnnnnnnnnnnnnnnnnnnnnnnnnnnnnnnnnnnnnnnnnnnnnnnnnnnnnnnnnnnnnnnnnnnnnnnnnnnnnnnnnnnnnnnnnnnnnnnnnnnnnnnnnnnnnnnnnnnnnnnnnnnnnnnnnnnnnnnnnnnnnnnnnnnnnnnnnnnnnnnnnnnnnnnnnnnnnnnnnnnnnnnnnnnnnnnnnnnnnnnnnnnnnnnnnnnnnnnnnnnnnnnnnnnnnnnnnnnnnnnnnnnnnnnnnnnnnnnnnnnnnnnnnnnnnnnnnnnnnnnnnnnnnnnnnnnnnnnnnnnnnnnnnnnnnnnnnnnnnnnnnnnnnnnnnnnnnnnnnnnnnnnnnnnnnnnnnnnnnnnnnnnnnnnnnnnnnnnnnnnnnnnnnnnnnnnnnnnnnnnnnnnnnnnnnnnnnnnnnnnnnnnnnnnnnnnnnnnnnnnnnnnnnnnnnnnnnnnnnnnnnnnnnnnnnnnnnnnnnnnnnnnnnnnnnnnnnnnnnnnnnnnnnnnnnnnnnnnnnnnnnnnnnnnnnnnnnnnnnnnnnnnnnnnnnnnnnnnnnnnnnnnnnnnnnnnnnnnnnnnnnnnnnnnnnnnnnnnnnnnnnnnnnnnnnnnnnnnnnnnnnnnnnnnnnnnnnnnnnnnnnnnnnnnnnnnnnnnnnnnnnnnnnnnnnnnnnnnnnnnnnnnnnnnnnnnnnnnnnnnnnnnnnnnnnnnnnnnnnnnnnnnnnnnnnnnnnnnnnnnnnnnnnnnnnnnnnnnnnnnnnnnnnnnnnnnnnnnnnnnnnnnnnnnnnnnnnnnnnnnnnnnnnnnnnnnnnnnnnnnnnnnnnnnnnnnnnnnnnnnnnnnnnnnnnnnnnnnnnnnnnnnnnnnnnnnnnnnnnnnnnnnnnnnnnnnnnnnnnnnnnnnnnnnnnnnnnnnnnnnnnnnnnnnnnnnnnnnnnnnnnnnnnnnnnnnnnnnnnnnnnnnnnnnnnnnnnnnnnnnnnnnnnnnnnnnnnnnnnnnnnnnnnnnnnnnnnnnnnnnnnnnnnnnnnnnnnnnnnnnnnnnnnnnnnnnnnnnnnnnnnnnnnnnnnnnnnnnnnnnnnnnnnnnnnnnnnnnnnnnnnnnnnnnnnnnnnnnnnnnnnnnnnnnnnnnnnnnnnnnnnnnnnnnnnnnnnnnnnnnnnnnnnnnnnnnnnnnnnnnnnnnnnnnnnnnnnnnnnnnnnnnnnnnnnnnnnnnnnnnnnnnnnnnnnnnnnnnnnnnnnnnnnnnnnnnnnnnnnnnnnnnnnnnnnnnnnnnnnnnnnnnnnnnnnnnnnnnnnnnnnnnnnnnnnnnnnnnnnnnnnnnnnnnnnnnnnnnnnnnnnnnnnnnnnnnnnnnnnnnnnnnnnnnnnnnnnnnnnnnnnnnnnnnnnnnnnnnnnnnnnnnnnnnnnnnnnnnnnnnnnnnnnnnnnnnnnnnnnnnnnnnnnnnnnnnnnnnnnnnnnnnnnnnnnnnnnnnnnnnnnnnnnnnnnnnnnnnnnnnnnnnnnnnnnnnnnnnnnnnnnnnnnnnnnnnnnnnnnnnnnnnnnnnnnnnnnnnnnnnnnnnnnnnnnnnnnnnnnnnnnnnnnnnnnnnnnnnnnnnnnnnnnnnnnnnnnnnnnnnnnnnnnnnnnnnnnnnnnnnnnnnnnnnnnnnnnnnnnnnnnnnnnnnnnnnnnnnnnnnnnnnnnnnnnnnnnnnnnnnnnnnnnnnnnnnnnnnnnnnnnnnnnnnnnnnnnnnnnnnnnnnnnnnnnnnnnnnnnnnnnnnnnnnnnnnnnnnnnnnnnnnnnnnnnnnnnnnnnnnnnnnnnnnnnnnnnnnnnnnnnnnnnnnnnnnnnnnnnnnnnnnnnnnnnnnnnnnnnnnnnnnnnnnnnnnnnnnnnnnnnnnnnnnnnnnnnnnnnnnnnnnnnnnnnnnnnnnnnnnnnnnnnnnnnnnnnnnnnnnnnnnnnnnnnnnnnnnnnnnnnnnnnnnnnnnnnnnnnnnnnnnnnnnnnnnnnnnnnnnnnnnnnnnnnnnnnnnnnnnnnnnnnnnnnnnnnnnnnnnnnnnnnnnnnnnnnnnnnnnnnnnnnnnnnnnnnnnnnnnnnnnnnnnnnnnnnnnnnnnnnnnnnnnnnnnnnnnnnnnnnnnnnnnnnnnnnnnnnnnnnnnnnnnnnnnnnnnnnnnnnnnnnnnnnnnnnnnnnnnnnnnnnnnnnnnnnnnnnnnnnnnnnnnnnnnnnnnnnnnnnnnnnnnnnnnnnnnnnnnnnnnnnnnnnnnnnnnnnnnnnnnnnnnnnnnnnnnnnnnnnnnnnnnnnnnnnnnnnnnnnnnnnnnnnnnnnnnnnnnnnnnnnnnnnnnnnnnnnnnnnnnnnnnnnnnnnnnnnnnnnnnnnnnnnnnnnnnnnnnnnnnnnnnnnnnnnnnnnnnnnnnnnnnnnnnnnnnnnnnnnnnnnnnnnnnnnnnnnnnnnnnnnnnnnnnnnnnnnnnnnnnnnnnnnnnnnnnnnnnnnnnnnnnnnnnnnnnnnnnnnnnnnnnnnnnnnnnnnnnnnnnnnnnnnnnnnnnnnnnnnnnnnnnnnnnnnnnnnnnnnnnnnnnnnnnnnnnnnnnnnnnnnnnnnnnnnnnnnnnnnnnnnnnnnnnnnnnnnnnnnnnnnnnnnnnnnnnnnnnnnnnnnnnnnnnnnnnnnnnnnnnnnnnnnnnnnnnnnnnnnnnnnnnnnnnnnnnnnnnnnnnnnnnnnnnnnnnnnnnnnnnnnnnnnnnnnnnnnnnnnnnnnnnnnnnnnnnnnnnnnnnnnnnnnnnnnnnnnnnnnnnnnnnnnnnnnnnnnnnnnnnnnnnnnnnnnnnnnnnnnnnnnnnnnnnnnnnnnnnnnnnnnnnnnnnnnnnnnnnnnnnnnnnnnnnnnnnnnnnnnnnnnnnnnnnnnnnnnnnnnnnnnnnnnnnnnnnnnnnnnnnnnnnnnnnnnnnnnnnnnnnnnnnnnnnnnnnnnnnnnnnnnnnnnnnnnnnnnnnnnnnnnnnnnnnnnnnnnnnnnnnnnnnnnnnnnnnnnnnnnnnnnnnnnnnnnnnnnnnnnnnnnnnnnnnnnnnnnnnnnnnnnnnnnnnnnnnnnnnnnnnnnnnnnnnnnnnnnnnnnnnnnnnnnnnnnnnnnnnnnnnnnnnnnnnnnnnnnnnnnnnnnnnnnnnnnnnnnnnnnnnnnnnnnnnnnnnnnnnnnnnnnnnnnnnnnnnnnnnnnnnnnnnnnnnnnnnnnnnnnnnnnnnnnnnnnnnnnnnnnnnnnnnnnnnnnnnnnnnnnnnnnnnnnnnnnnnnnnnnnnnnnnnnnnnnnnnnnnnnnnnnnnnnnnnnnnnnnnnnnnnnnnnnnnnnnnnnnnnnnnnnnnnnnnnnnnnnnnnnnnnnnnnnnnnnnnnnnnnnnnnnnnnnnnnnnnnnnnnnnnnnnnnnnnnnnnnnnnnnnnnnnnnnnnnnnnnnnnnnnnnnnnnnnnnnnnnnnnnnnnnnnnnnnnnnnnnnnnnnnnnnnnnnnnnnnnnnnnnnnnnnnnnnnnnnnnnnnnnnnnnnnnnnnnnnnnnnnnnnnnnnnnnnnnnnnnnnnnnnnnnnnnnnnnnnnnnnnnnnnnnnnnnnnnnnnnnnnnnnnnnnnnnnnnnnnnnnnnnnnnnnnnnnnnnnnnnnnnnnnnnnnnnnnnnnnnnnnnnnnnnnnnnnnnnnnnnnnnnnnnnnnnnnnnnnnnnnnnnnnnnnnnnnnnnnnnnnnnnnnnnnnnnnnnnnnnnnnnnnnnnnnnnnnnnnnnnnnnnnnnnnnnnnnnnnnnnnnnnnnnnnnnnnnnnnnnnnnnnnnnnnnnnnnnnnnnnnnnnnnnnnnnnnnnnnnnnnnnnnnnnnnnnnnnnnnnnnnnnnnnnnnnnnnnnnnnnnnnnnnnnnnnnnnnnnnnnnnnnnnnnnnnnnnnnnnnnnnnnnnnnnnnnnnnnnnnnnnnnnnnnnnnnnnnnnnnnnnnnnnnnnnnnnnnnnnnnnnnnnnnnnnnnnnnnnnnnnnnnnnnnnnnnnnnnnnnnnnnnnnnnnnnnnnnnnnnnnnnnnnnnnnnnnnnnnnnnnnnnnnnnnnnnnnnnnnnnnnnnnnnnnnnnnnnnnnnnnnnnnnnnnnnnnnnnnnnnnnnnnnnnnnnnnnnnnnnnnnnnnnnnnnnnnnnnnnnnnnnnnnnnnnnnnnnnnnnnnnnnnnnnnnnnnnnnnnnnnnnnnnnnnnnnnnnnnnnnnnnnnnnnnnnnnnnnnnnnnnnnnnnnnnnnnnnnnnnnnnnnnnnnnnnnnnnnnnnnnnnnnnnnnnnnnnnnnnnnnnnnnnnnnnnnnnnnnnnnnnnnnnnnnnnnnnnnnnnnnnnnnnnnnnnnnnnnnnnnnnnnnnnnnnnnnnnnnnnnnnnnnnnnnnnnnnnnnnnnnnnnnnnnnnnnnnnnnnnnnnnnnnnnnnnnnnnnnnnnnnnnnnnnnnnnnnnnnnnnnnnnnnnnnnnnnnnnnnnnnnnnnnnnnnnnnnnnnnnnnnnnnnnnnnnnnnnnnnnnnnnnnnnnnnnnnnnnnnnnnnnnnnnnnnnnnnnnnnnnnnnnnnnnnnnnnnnnnnnnnnnnnnnnnnnnnnnnnnnnnnnnnnnnnnnnnnnnnnnnnnnnnnnnnnnnnnnnnnnnnnnnnnnnnnnnnnnnnnnnnnnnnnnnnnnnnnnnnnnnnnnnnnnnnnnnnnnnnnnnnnnnnnnnnnnnnnnnnnnnnnnnnnnnnnnnnnnnnnnnnnnnnnnnnnnnnnnnnnnnnnnnnnnnnnnnnnnnnnnnnnnnnnnnnnnnnnnnnnnnnnnnnnnnnnnnnnnnnnnnnnnnnnnnnnnnnnnnnnnnnnnnnnnnnnnnnnnnnnnnnnnnnnnnnnnnnnnnnnnnnnnnnnnnnnnnnnnnnnnnnnnnnnnnnnnnnnnnnnnnnnnnnnnnnnnnnnnnnnnnnnnnnnnnnnnnnnnnnnnnnnnnnnnnnnnnnnnnnnnnnnnnnnnnnnnnnnnnnnnnnnnnnnnnnnnnnnnnnnnnnnnnnnnnnnnnnnnnnnnnnnnnnnnnnnnnnnnnnnnnnnnnnnnnnnnnnnnnnnnnnnnnnnnnnnnnnnnnnnnnnnnnnnnnnnnnnnnnnnnnnnnnnnnnnnnnnnnnnnnnnnnnnnnnnnnnnnnnnnnnnnnnnnnnnnnnnnnnnnnnnnnnnnnnnnnnnnnnnnnnnnnnnnnnnnnnnnnnnnnnnnnnnnnnnnnnnnnnnnnnnnnnnnnnnnnnnnnnnnnnnnnnnnnnnnnnnnnnnnnnnnnnnnnnnnnnnnnnnnnnnnnnnnnnnnnnnnnnnnnnnnnnnnnnnnnnnnnnnnnnnnnnnnnnnnnnnnnnnnnnnnnnnnnnnnnnnnnnnnnnnnnnnnnnnnnnnnnnnnnnnnnnnnnnnnnnnnnnnnnnnnnnnnnnnnnnnnnnnnnnnnnnnnnnnnnnnnnnnnnnnnnnnnnnnnnnnnnnnnnnnnnnnnnnnnnnnnnnnnnnnnnnnnnnnnnnnnnnnnnnnnnnnnnnnnnnnnnnnnnnnnnnnnnnnnnnnnnnnnnnnnnnnnnnnnnnnnnnnnnnnnnnnnnnnnnnnnnnnnnnnnnnnnnnnnnnnnnnnnnnnnnnnnnnnnnnnnnnnnnnnnnnnnnnnnnnnnnnnnnnnnnnnnnnnnnnnnnnnnnnnnnnnnnnnnnnnnnnnnnnnnnnnnnnnnnnnnnnnnnnnnnnnnnnnnnnnnnnnnnnnnnnnnnnnnnnnnnnnnnnnnnnnnnnnnnnnnnnnnnnnnnnnnnnnnnnnnnnnnnnnnnnnnnnnnnnnnnnnnnnnnnnnnnnnnnnnnnnnnnnnnnnnnnnnnnnnnnnnnnnnnnnnnnnnnnnnnnnnnnnnnnnnnnnnnnnnnnnnnnnnnnnnnnnnnnnnnnnnnnnnnnnnnnnnnnnnnnnnnnnnnnnnnnnnnnnnnnnnnnnnnnnnnnnnnnnnnnnnnnnnnnnnnnnnnnnnnnnnnnnnnnnnnnnnnnnnnnnnnnnnnnnnnnnnnnnnnnnnnnnnnnnnnnnnnnnnnnnnnnnnnnnnnnnnnnnnnnnnnnnnnnnnnnnnnnnnnnnnnnnnnnnnnnnnnnnnnnnnnnnnnnnnnnnnnnnnnnnnnnnnnnnnnnnnnnnnnnnnnnnnnnnnnnnnnnnnnnnnnnnnnnnnnnnnnnnnnnnnnnnnnnnnnnnnnnnnnnnnnnnnnnnnnnnnnnnnnnnnnnnnnnnnnnnnnnnnnnnnnnnnnnnnnnnnnnnnnnnnnnnnnnnnnnnnnnnnnnnnnnnnnnnnnnnnnnnnnnnnnnnnnnnnnnnnnnnnnnnnnnnnnnnnnnnnnnnnnnnnnnnnnnnnnnnnnnnnnnnnnnnnnnnnnnnnnnnnnnnnnnnnnnnnnnnnnnnnnnnnnnnnnnnnnnnnnnnnnnnnnnnnnnnnnnnnnnnnnnnnnnnnnnnnnnnnnnnnnnnnnnnnnnnnnnnnnnnnnnnnnnnnnnnnnnnnnnnnnnnnnnnnnnnnnnnnnnnnnnnnnnnnnnnnnnnnnnnnnnnnnnnnnnnnnnnnnnnnnnnnnnnnnnnnnnnnnnnnnnnnnnnnnnnnnnnnnnnnnnnnnnnnnnnnnnnnnnnnnnnnnnnnnnnnnnnnnnnnnnnnnnnnnnnnnnnnnnnnnnnnnnnnnnnnnnnnnnnnnnnnnnnnnnnnnnnnnnnnnnnnnnnnnnnnnnnnnnnnnnnnnnnnnnnnnnnnnnnnnnnnnnnnnnnnnnnnnnnnnnnnnnnnnnnnnnnnnnnnnnnnnnnnnnnnnnnnnnnnnnnnnnnnnnnnnnnnnnnnnnnnnnnnnnnnnnnnnnnnnnnnnnnnnnnnnnnnnnnnnnnnnnnnnnnnnnnnnnnnnnnnnnnnnnnnnnnnnnnnnnnnnnnnnnnnnnnnnnnnnnnnnnnnnnnnnnnnnnnnnnnnnnnnnnnnnnnnnnnnnnnnnnnnnnnnnnnnnnnnnnnnnnnnnnnnnnnnnnnnnnnnnnnnnnnnnnnnnnnnnnnnnnnnnnnnnnnnnnnnnnnnnnnnnnnnnnnnnnnnnnnnnnnnnnnnnnnnnnnnnnnnnnnnnnnnnnnnnnnnnnnnnnnnnnnnnnnnnnnnnnnnnnnnnnnnnnnnnnnnnnnnnnnnnnnnnnnnnnnnnnnnnnnnnnnnnnnnnnnnnnnnnnnnnnnnnnnnnnnnnnnnnnnnnnnnnnnnnnnnnnnnnnnnnnnnnnnnnnnnnnnnnnnnnnnnnnnnnnnnnnnnnnnnnnnnnnnnnnnnnnnnnnnnnnnnnnnnnnnnnnnnnnnnnnnnnnnnnnnnnnnnnnnnnnnnnnnnnnnnnnnnnnnnnnnnnnnnnnnnnnnnnnnnnnnnnnnnnnnnnnnnnnnnnnnnnnnnnnnnnnnnnnnnnnnnnnnnnnnnnnnnnnnnnnnnnnnnnnnnnnnnnnnnnnnnnnnnnnnnnnnnnnnnnnnnnnnnnnnnnnnnnnnnnnnnnnnnnnnnnnnnnnnnnnnnnnnnnnnnnnnnnnnnnnnnnnnnnnnnnnnnnnnnnnnnnnnnnnnnnnnnnnnnnnnnnnnnnnnnnnnnnnnnnnnnnnnnnnnnnnnnnnnnnnnnnnnnnnnnnnnnnnnnnnnnnnnnnnnnnnnnnnnnnnnnnnnnnnnnnnnnnnnnnnnnnnnnnnnnnnnnnnnnnnnnnnnnnnnnnnnnnnnnnnnnnnnnnnnnnnnnnnnnnnnnnnnnnnnnnnnnnnnnnnnnnnnnnnnnnnnnnnnnnnnnnnnnnnnnnnnnnnnnnnnnnnnnnnnnnnnnnnnnnnnnnnnnnnnnnnnnnnnnnnnnnnnnnnnnnnnnnnnnnnnnnnnnnnnnnnnnnnnnnnnnnnnnnnnnnnnnnnnnnnnnnnnnnnnnnnnnnnnnnnnnnnnnnnnnnnnnnnnnnnnnnnnnnnnnnnnnnnnnnnnnnnnnnnnnnnnnnnnnnnnnnnnnnnnnnnnnnnnnnnnnnnnnnnnnnnnnnnnnnnnnnnnnnnnnnnnnnnnnnnnnnnnnnnnnnnnnnnnnnnnnnnnnnnnnnnnnnnnnnnnnnnnnnnnnnnnnnnnnnnnnnnnnnnnnnnnnnnnnnnnnnnnnnnnnnnnnnnnnnnnnnnnnnnnnnnnnnnnnnnnnnnnnnnnnnnnnnnnnnnnnnnnnnnnnnnnnnnnnnnnnnnnnnnnnnnnnnnnnnnnnnnnnnnnnnnnnnnnnnnnnnnnnnnnnnnnnnnnnnnnnnnnnnnnnnnnnnnnnnnnnnnnnnnnnnnnnnnnnnnnnnnnnnnnnnnnnnnnnnnnnnnnnnnnnnnnnnnnnnnnnnnnnnnnnnnnnnnnnnnnnnnnnnnnnnnnnnnnnnnnnnnnnnnnnnnnnnnnnnnnnnnnnnnnnnnnnnnnnnnnnnnnnnnnnnnnnnnnnnnnnnnnnnnnnnnnnnnnnnnnnnnnnnnnnnnnnnnnnnnnnnnnnnnnnnnnnnnnnnnnnnnnnnnnnnnnnnnnnnnnnnnnnnnnnnnnnnnnnnnnnnnnnnnnnnnnnnnnnnnnnnnnnnnnnnnnnnnnnnnnnnnnnnnnnnnnnnnnnnnnnnnnnnnnnnnnnnnnnnnnnnnnnnnnnnnnnnnnnnnnnnnnnnnnnnnnnnnnnnnnnnnnnnnnnnnnnnnnnnnnnnnnnnnnnnnnnnnnnnnnnnnnnnnnnnnnnnnnnnnnnnnnnnnnnnnnnnnnnnnnnnnnnnnnnnnnnnnnnnnnnnnnnnnnnnnnnnnnnnnnnnnnnnnnnnnnnnnnnnnnnnnnnnnnnnnnnnnnnnnnnnnnnnnnnnnnnnnnnnnnnnnnnnnnnnnnnnnnnnnnnnnnnnnnnnnnnnnnnnnnnnnnnnnnnnnnnnnnnnnnnnnnnnnnnnnnnnnnnnnnnnnnnnnnnnnnnnnnnnnnnnnnnnnnnnnnnnnnnnnnnnnnnnnnnnnnnnnnnnnnnnnnnnnnnnnnnnnnnnnnnnnnnnnnnnnnnnnnnnnnnnnnnnnnnnnnnnnnnnnnnnnnnnnnnnnnnnnnnnnnnnnnnnnnnnnnnnnnnnnnnnnnnnnnnnnnnnnnnnnnnnnnnnnnnnnnnnnnnnnnnnnnnnnnnnnnnnnnnnnnnnnnnnnnnnnnnnnnnnnnnnnnnnnnnnnnnnnnnnnnnnnnnnnnnnnnnnnnnnnnnnnnnnnnnnnnnnnnnnnnnnnnnnnnnnnnnnnnnnnnnnnnnnnnnnnnnnnnnnnnnnnnnnnnnnnnnnnnnnnnnnnnnnnnnnnnnnnnnnnnnnnnnnnnnnnnnnnnnnnnnnnnnnnnnnnnnnnnnnnnnnnnnnnnnnnnnnnnnnnnnnnnnnnnnnnnnnnnnnnnnnnnnnnnnnnnnnnnnnnnnnnnnnnnnnnnnnnnnnnnnnnnnnnnnnnnnnnnnnnnnnnnnnnnnnnnnnnnnnnnnnnnnnnnnnnnnnnnnnnnnnnnnnnnnnnnnnnnnnnnnnnnnnnnnnnnnnnnnnnnnnnnnnnnnnnnnnnnnnnnnnnnnnnnnnnnnnnnnnnnnnnnnnnnnnnnnnnnnnnnnnnnnnnnnnnnnnnnnnnnnnnnnnnnnnnnnnnnnnnnnnnnnnnnnnnnnnnnnnnnnnnnnnnnnnnnnnnnnnnnnnnnnnnnnnnnnnnnnnnnnnnnnnnnnnnnnnnnnnnnnnnnnnnnnnnnnnnnnnnnnnnnnnnnnnnnnnnnnnnnnnnnnnnnnnnnnnnnnnnnnnnnnnnnnnnnnnnnnnnnnnnnnnnnnnnnnnnnnnnnnnnnnnnnnnnnnnnnnnnnnnnnnnnnnnnnnnnnnnnnnnnnnnnnnnnnnnnnnnnnnnnnnnnnnnnnnnnnnnnnnnnnnnnnnnnnnnnnnnnnnnnnnnnnnnnnnnnnnnnnnnnnnnnnnnnnnnnnnnnnnnnnnnnnnnnnnnnnnnnnnnnnnnnnnnnnnnnnnnnnnnnnnnnnnnnnnnnnnnnnnnnnnnnnnnnnnnnnnnnnnnnnnnnnnnnnnnnnnnnnnnnnnnnnnnnnnnnnnnnnnnnnnnnnnnnnnnnnnnnnnnnnnnnnnnnnnnnnnnnnnnnnnnnnnnnnnnnnnnnnnnnnnnnnnnnnnnnnnnnnnnnnnnnnnnnnnnnnnnnnnnnnnnnnnnnnnnnnnnnnnnnnnnnnnnnnnnnnnnnnnnnnnnnnnnnnnnnnnnnnnnnnnnnnnnnnnnnnnnnnnnnnnnnnnnnnnnnnnnnnnnnnnnnnnnnnnnnnnnnnnnnnnnnnnnnnnnnnnnnnnnnnnnnnnnnnnnnnnnnnnnnnnnnnnnnnnnnnnnnnnnnnnnnnnnnnnnnnnnnnnnnnnnnnnnnnnnnnnnnnnnnnnnnnnnnnnnnnnnnnnnnnnnnnnnnnnnnnnnnnnnnnnnnnnnnnnnnnnnnnnnnnnnnnnnnnnnnnnnnnnnnnnnnnnnnnnnnnnnnnnnnnnnnnnnnnnnnnnnnnnnnnnnnnnnnnnnnnnnnnnnnnnnnnnnnnnnnnnnnnnnnnnnnnnnnnnnnnnnnnnnnnnnnnnnnnnnnnnnnnnnnnnnnnnnnnnnnnnnnnnnnnnnnnnnnnnnnnnnnnnnnnnnnnnnnnnnnnnnnnnnnnnnnnnnnnnnnnnnnnnnnnnnnnnnnnnnnnnnnnnnnnnnnnnnnnnnnnnnnnnnnnnnnnnnnnnnnnnnnnnnnnnnnnnnnnnnnnnnnnnnnnnnnnnnnnnnnnnnnnnnnnnnnnnnnnnnnnnnnnnnnnnnnnnnnnnnnnnnnnnnnnnnnnnnnnnnnnnnnnnnnnnnnnnnnnnnnnnnnnnnnnnnnnnnnnnnnnnnnnnnnnnnnnnnnnnnnnnnnnnnnnnnnnnnnnnnnnnnnnnnnnnnnnnnnnnnnnnnnnnnnnnnnnnnnnnnnnnnnnnnnnnnnnnnnnnnnnnnnnnnnnnnnnnnnnnnnnnnnnnnnnnnnnnnnnnnnnnnnnnnnnnnnnnnnnnnnnnnnnnnnnnnnnnnnnnnnnnnnnnnnnnnnnnnnnnnnnnnnnnnnnnnnnnnnnnnnnnnnnnnnnnnnnnnnnnnnnnnnnnnnnnnnnnnnnnnnnnnnnnnnnnnnnnnnnnnnnnnnnnnnnnnnnnnnnnnnnnnnnnnnnnnnnnnnnnnnnnnnnnnnnnnnnnnnnnnnnnnnnnnnnnnnnnnnnnnnnnnnnnnnnnnnnnnnnnnnnnnnnnnnnnnnnnnnnnnnnnnnnnnnnnnnnnnnnnnnnnnnnnnnnnnnnnnnnnnnnnnnnnnnnnnnnnnnnnnnnnnnnnnnnnnnnnnnnnnnnnnnnnnnnnnnnnnnnnnnnnnnnnnnnnnnnnnnnnnnnnnnnnnnnnnnnnnnnnnnnnnnnnnnnnnnnnnnnnnnnnnnnnnnnnnnnnnnnnnnnnnnnnnnnnnnnnnnnnnnnnnnnnnnnnnnnnnnnnnnnnnnnnnnnnnnnnnnnnnnnnnnnnnnnnnnnnnnnnnnnnnnnnnnnnnnnnnnnnnnnnnnnnnnnnnnnnnnnnnnnnnnnnnnnnnnnnnnnnnnnnnnnnnnnnnnnnnnnnnnnnnnnnnnnnnnnnnnnnnnnnnnnnnnnnnnnnnnnnnnnnnnnnnnnnnnnnnnnnnnnnnnnnnnnnnnnnnnnnnnnnnnnnnnnnnnnnnnnnnnnnnnnnnnnnnnnnnnnnnnnnnnnnnnnnnnnnnnnnnnnnnnnnnnnnnnnnnnnnnnnnnnnnnnnnnnnnnnnnnnnnnnnnnnnnnnnnnnnnnnnnnnnnnnnnnnnnnnnnnnnnnnnnnnnnnnnnnnnnnnnnnnnnnnnnnnnnnnnnnnnnnnnnnnnnnnnnnnnnnnnnnnnnnnnnnnnnnnnnnnnnnnnnnnnnnnnnnnnnnnnnnnnnnnnnnnnnnnnnnnnnnnnnnnnnnnnnnnnnnnnnnnnnnnnnnnnnnnnnnnnnnnnnnnnnnnnnnnnnnnnnnnnnnnnnnnnnnnnnnnnnnnnnnnnnnnnnnnnnnnnnnnnnnnnnnnnnnnnnnnnnnnnnnnnnnnnnnnnnnnnnnnnnnnnnnnnnnnnnnnnnnnnnnnnnnnnnnnnnnnnnnnnnnnnnnnnnnnnnnnnnnnnnnnnnnnnnnnnnnnnnnnnnnnnnnnnnnnnnnnnnnnnnnnnnnnnnnnnnnnnnnnnnnnnnnnnnnnnnnnnnnnnnnnnnnnnnnnnnnnnnnnnnnnnnnnnnnnnnnnnnnnnnnnnnnnnnnnnnnnnnnnnnnnnnnnnnnnnnnnnnnnnnnnnnnnnnnnnnnnnnnnnnnnnnnnnnnnnnnnnnnnnnnnnnnnnnnnnnnnnnnnnnnnnnnnnnnnnnnnnnnnnnnnnnnnnnnnnnnnnnnnnnnnnnnnnnnnnnnnnnnnnnnnnnnnnnnnnnnnnnnnnnnnnnnnnnnnnnnnnnnnnnnnnnnnnnnnnnnnnnnnnnnnnnnnnnnnnnnnnnnnnnnnnnnnnnnnnnnnnnnnnnnnnnnnnnnnnnnnnnnnnnnnnnnnnnnnnnnnnnnnnnnnnnnnnnnnnnnnnnnnnnnnnnnnnnnnnnnnnnnnnnnnnnnnnnnnnnnnnnnnnnnnnnnnnnnnnnnnnnnnnnnnnnnnnnnnnnnnnnnnnnnnnnnnnnnnnnnnnnnnnnnnnnnnnnnnnnnnnnnnnnnnnnnnnnnnnnnnnnnnnnnnnnnnnnnnnnnnnnnnnnnnnnnnnnnnnnnnnnnnnnnnnnnnnnnnnnnnnnnnnnnnnnnnnnnnnnnnnnnnnnnnnnnnnnnnnnnnnnnnnnnnnnnnnnnnnnnnnnnnnnnnnnnnnnnnnnnnnnnnnnnnnnnnnnnnnnnnnnnnnnnnnnnnnnnnnnnnnnnnnnnnnnnnnnnnnnnnnnnnnnnnnnnnnnnnnnnnnnnnnnnnnnnnnnnnnnnnnnnnnnnnnnnnnnnnnnnnnnnnnnnnnnnnnnnnnnnnnnnnnnnnnnnnnnnnnnnnnnnnnnnnnnnnnnnnnnnnnnnnnnnnnnnnnnnnnnnnnnnnnnnnnnnnnnnnnnnnnnnnnnnnnnnnnnnnnnnnnnnnnnnnnnnnnnnnnnnnnnnnnnnnnnnnnnnnnnnnnnnnnnnnnnnnnnnnnnnnnnnnnnnnnnnnnnnnnnnnnnnnnnnnnnnnnnnnnnnnnnnnnnnnnnnnnnnnnnnnnnnnnnnnnnnnnnnnnnnnnnnnnnnnnnnnnnnnnnnnnnnnnnnnnnnnnnnnnnnnnnnnnnnnnnnnnnnnnnnnnnnnnnnnnnnnnnnnnnnnnnnnnnnnnnnnnnnnnnnnnnnnnnnnnnnnnnnnnnnnnnnnnnnnnnnnnnnnnnnnnnnnnnnnnnnnnnnnnnnnnnnnnnnnnnnnnnnnnnnnnnnnnnnnnnnnnnnnnnnnnnnnnnnnnnnnnnnnnnnnnnnnnnnnnnnnnnnnnnnnnnnnnnnnnnnnnnnnnnnnnnnnnnnnnnnnnnnnnnnnnnnnnnnnnnnnnnnnnnnnnnnnnnnnnnnnnnnnnnnnnnnnnnnnnnnnnnnnnnnnnnnnnnnnnnnnnnnnnnnnnnnnnnnnnnnnnnnnnnnnnnnnnnnnnnnnnnnnnnnnnnnnnnnnnnnnnnnnnnnnnnnnnnnnnnnnnnnnnnnnnnnnnnnnnnnnnnnnnnnnnnnnnnnnnnnnnnnnnnnnnnnnnnnnnnnnnnnnnnnnnnnnnnnnnnnnnnnnnnnnnnnnnnnnnnnnnnnnnnnnnnnnnnnnnnnnnnnnnnnnnnnnnnnnnnnnnnnnnnnnnnnnnnnnnnnnnnnnnnnnnnnnnnnnnnnnnnnnnnnnnnnnnnnnnnnnnnnnnnnnnnnnnnnnnnnnnnnnnnnnnnnnnnnnnnnnnnnnnnnnnnnnnnnnnnnnnnnnnnnnnnnnnnnnnnnnnnnnnnnnnnnnnnnnnnnnnnnnnnnnnnnnnnnnnnnnnnnnnnnnnnnnnnnnnnnnnnnnnnnnnnnnnnnnnnnnnnnnnnnnnnnnnnnnnnnnnnnnnnnnnnnnnnnnnnnnnnnnnnnnnnnnnnnnnnnnnnnnnnnnnnnnnnnnnnnnnnnnnnnnnnnnnnnnnnnnnnnnnnnnnnnnnnnnnnnnnnnnnnnnnnnnnnnnnnnnnnnnnnnnnnnnnnnnnnnnnnnnnnnnnnnnnnnnnnnnnnnnnnnnnnnnnnnnnnnnnnnnnnnnnnnnnnnnnnnnnnnnnnnnnnnnnnnnnnnnnnnnnnnnnnnnnnnnnnnnnnnnnnnnnnnnnnnnnnnnnnnnnnnnnnnnnnnnnnnnnnnnnnnnnnnnnnnnnnnnnnnnnnnnnnnnnnnnnnnnnnnnnnnnnnnnnnnnnnnnnnnnnnnnnnnnnnnnnnnnnnnnnnnnnnnnnnnnnnnnnnnnnnnnnnnnnnnnnnnnnnnnnnnnnnnnnnnnnnnnnnnnnnnnnnnnnnnnnnnnnnnnnnnnnnnnnnnnnnnnnnnnnnnnnnnnnnnnnnnnnnnnnnnnnnnnnnnnnnnnnnnnnnnnnnnnnnnnnnnnnnnnnnnnnnnnnnnnnnnnnnnnnnnnnnnnnnnnnnnnnnnnnnnnnnnnnnnnnnnnnnnnnnnnnnnnnnnnnnnnnnnnnnnnnnnnnnnnnnnnnnnnnnnnnnnnnnnnnnnnnnnnnnnnnnnnnnnnnnnnnnnnnnnnnnnnnnnnnnnnnnnnnnnnnnnnnnnnnnnnnnnnnnnnnnnnnnnnnnnnnnnnnnnnnnnnnnnnnnnnnnnnnnnnnnnnnnnnnnnnnnnnnnnnnnnnnnnnnnnnnnnnnnnnnnnnnnnnnnnnnnnnnnnnnnnnnnnnnnnnnnnnnnnnnnnnnnnnnnnnnnnnnnnnnnnnnnnnnnnnnnnnnnnnnnnnnnnnnnnnnnnnnnnnnnnnnnnnnnnnnnnnnnnnnnnnnnnnnnnnnnnnnnnnnnnnnnnnnnnnnnnnnnnnnnnnnnnnnnnnnnnnnnnnnnnnnnnnnnnnnnnnnnnnnnnnnnnnnnnnnnnnnnnnnnnnnnnnnnnnnnnnnnnnnnnnnnnnnnnnnnnnnnnnnnnnnnnnnnnnnnnnnnnnnnnnnnnnnnnnnnnnnnnnnnnnnnnnnnnnnnnnnnnnnnnnnnnnnnnnnnnnnnnnnnnnnnnnnnnnnnnnnnnnnnnnnnnnnnnnnnnnnnnnnnnnnnnnnnnnnnnnnnnnnnnnnnnnnnnnnnnnnnnnnnnnnnnnnnnnnnnnnnnnnnnnnnnnnnnnnnnnnnnnnnnnnnnnnnnnnnnnnnnnnnnnnnnnnnnnnnnnnnnnnnnnnnnnnnnnnnnnnnnnnnnnnnnnnnnnnnnnnnnnnnnnnnnnnnnnnnnnnnnnnnnnnnnnnnnnnnnnnnnnnnnnnnnnnnnnnnnnnnnnnnnnnnnnnnnnnnnnnnnnnnnnnnnnnnnnnnnnnnnnnnnnnnnnnnnnnnnnnnnnnnnnnnnnnnnnnnnnnnnnnnnnnnnnnnnnnnnnnnnnnnnnnnnnnnnnnnnnnnnnnnnnnnnnnnnnnnnnnnnnnnnnnnnnnnnnnnnnnnnnnnnnnnnnnnnnnnnnnnnnnnnnnnnnnnnnnnnnnnnnnnnnnnnnnnnnnnnnnnnnnnnnnnnnnnnnnnnnnnnnnnnnnnnnnnnnnnnnnnnnnnnnnnnnnnnnnnnnnnnnnnnnnnnnnnnnnnnnnnnnnnnnnnnnnnnnnnnnnnnnnnnnnnnnnnnnnnnnnnnnnnnnnnnnnnnnnnnnnnnnnnnnnnnnnnnnnnnnnnnnnnnnnnnnnnnnnnnnnnnnnnnnnnnnnnnnnnnnnnnnnnnnnnnnnnnnnnnnnnnnnnnnnnnnnnnnnnnnnnnnnnnnnnnnnnnnnnnnnnnnnnnnnnnnnnnnnnnnnnnnnnnnnnnnnnnnnnnnnnnnnnnnnnnnnnnnnnnnnnnnnnnnnnnnnnnnnnnnnnnnnnnnnnnnnnnnnnnnnnnnnnnnnnnnnnnnnnnnnnnnnnnnnnnnnnnnnnnnnnnnnnnnnnnnnnnnnnnnnnnnnnnnnnnnnnnnnnnnnnnnnnnnnnnnnnnnnnnnnnnnnnnnnnnnnnnnnnnnnnnnnnnnnnnnnnnnnnnnnnnnnnnnnnnnnnnnnnnnnnnnnnnnnnnnnnnnnnnnnnnnnnnnnnnnnnnnnnnnnnnnnnnnnnnnnnnnnnnnnnnnnnnnnnnnnnnnnnnnnnnnnnnnnnnnnnnnnnnnnnnnnnnnnnnnnnnnnnnnnnnnnnnnnnnnnnnnnnnnnnnnnnnnnnnnnnnnnnnnnnnnnnnnnnnnnnnnnnnnnnnnnnnnnnnnnnnnnnnnnnnnnnnnnnnnnnnnnnnnnnnnnnnnnnnnnnnnnnnnnnnnnnnnnnnnnnnnnnnnnnnnnnnnnnnnnnnnnnnnnnnnnnnnnnnnnnnnnnnnnnnnnnnnnnnnnnnnnnnnnnnnnnnnnnnnnnnnnnnnnnnnnnnnnnnnnnnnnnnnnnnnnnnnnnnnnnnnnnnnnnnnnnnnnnnnnnnnnnnnnnnnnnnnnnnnnnnnnnnnnnnnnnnnnnnnnnnnnnnnnnnnnnnnnnnnnnnnnnnnnnnnnnnnnnnnnnnnnnnnnnnnnnnnnnnnnnnnnnnnnnnnnnnnnnnnnnnnnnnnnnnnnnnnnnnnnnnnnnnnnnnnnnnnnnnnnnnnnnnnnnnnnnnnnnnnnnnnnnnnnnnnnnnnnnnnnnnnnnnnnnnnnnnnnnnnnnnnnnnnnnnnnnnnnnnnnnnnnnnnnnnnnnnnnnnnnnnnnnnnnnnnnnnnnnnnnnnnnnnnnnnnnnnnnnnnnnnnnnnnnnnnnnnnnnnnnnnnnnnnnnnnnnnnnnnnnnnnnnnnnnnnnnnnnnnnnnnnnnnnnnnnnnnnnnnnnnnnnnnnnnnnnnnnnnnnnnnnnnnnnnnnnnnnnnnnnnnnnnnnnnnnnnnnnnnnnnnnnnnnnnnnnnnnnnnnnnnnnnnnnnnnnnnnnnnnnnnnnnnnnnnnnnnnnnnnnnnnnnnnnnnnnnnnnnnnnnnnnnnnnnnnnnnnnnnnnnnnnnnnnnnnnnnnnnnnnnnnnnnnnnnnnnnnnnnnnnnnnnnnnnnnnnnnnnnnnnnnnnnnnnnnnnnnnnnnnnnnnnnnnnnnnnnnnnnnnnnnnnnnnnnnnnnnnnnnnnnnnnnnnnnnnnnnnnnnnnnnnnnnnnnnnnnnnnnnnnnnnnnnnnnnnnnnnnnnnnnnnnnnnnnnnnnnnnnnnnnnnnnnnnnnnnnnnnnnnnnnnnnnnnnnnnnnnnnnnnnnnnnnnnnnnnnnnnnnnnnnnnnnnnnnnnnnnnnnnnnnnnnnnnnnnnnnnnnnnnnnnnnnnnnnnnnnnnnnnnnnnnnnnnnnnnnnnnnnnnnnnnnnnnnnnnnnnnnnnnnnnnnnnnnnnnnnnnnnnnnnnnnnnnnnnnnnnnnnnnnnnnnnnnnnnnnnnnnnnnnnnnnnnnnnnnnnnnnnnnnnnnnnnnnnnnnnnnnnnnnnnnnnnnnnnnnnnnnnnnnnnnnnnnnnnnnnnnnnnnnnnnnnnnnnnnnnnnnnnnnnnnnnnnnnnnnnnnnnnnnnnnnnnnnnnnnnnnnnnnnnnnnnnnnnnnnnnnnnnnnnnnnnnnnnnnnnnnnnnnnnnnnnnnnnnnnnnnnnnnnnnnnnnnnnnnnnnnnnnnnnnnnnnnnnnnnnnnnnnnnnnnnnnnnnnnnnnnnnnnnnnnnnnnnnnnnnnnnnnnnnnnnnnnnnnnnnnnnnnnnnnnnnnnnnnnnnnnnnnnnnnnnnnnnnnnnnnnnnnnnnnnnnnnnnnnnnnnnnnnnnnnnnnnnnnnnnnnnnnnnnnnnnnnnnnnnnnnnnnnnnnnnnnnnnnnnnnnnnnnnnnnnnnnnnnnnnnnnnnnnnnnnnnnnnnnnnnnnnnnnnnnnnnnnnnnnnnnnnnnnnnnnnnnnnnnnnnnnnnnnnnnnnnnnnnnnnnnnnnnnnnnnnnnnnnnnnnnnnnnnnnnnnnnnnnnnnnnnnnnnnnnnnnnnnnnnnnnnnnnnnnnnnnnnnnnnnnnnnnnnnnnnnnnnnnnnnnnnnnnnnnnnnnnnnnnnnnnnnnnnnnnnnnnnnnnnnnnnnnnnnnnnnnnnnnnnnnnnnnnnnnnnnnnnnnnnnnnnnnnnnnnnnnnnnnnnnnnnnnnnnnnnnnnnnnnnnnnnnnnnnnnnnnnnnnnnnnnnnnnnnnnnnnnnnnnnnnnnnnnnnnnnnnnnnnnnnnnnnnnnnnnnnnnnnnnnnnnnnnnnnnnnnnnnnnnnnnnnnnnnnnnnnnnnnnnnnnnnnnnnnnnnnnnnnnnnnnnnnnnnnnnnnnnnnnnnnnnnnnnnnnnnnnnnnnnnnnnnnnnnnnnnnnnnnnnnnnnnnnnnnnnnnnnnnnnnnnnnnnnnnnnnnnnnnnnnnnnnnnnnnnnnnnnnnnnnnnnnnnnnnnnnnnnnnnnnnnnnnnnnnnnnnnnnnnnnnnnnnnnnnnnnnnnnnnnnnnnnnnnnnnnnnnnnnnnnnnnnnnnnnnnnnnnnnnnnnnnnnnnnnnnnnnnnnnnnnnnnnnnnnnnnnnnnnnnnnnnnnnnnnnnnnnnnnnnnnnnnnnnnnnnnnnnnnnnnnnnnnnnnnnnnnnnnnnnnnnnnnnnnnnnnnnnnnnnnnnnnnnnnnnnnnnnnnnnnnnnnnnnnnnnnnnnnnnnnnnnnnnnnnnnnnnnnnnnnnnnnnnnnnnnnnnnnnnnnnnnnnnnnnnnnnnnnnnnnnnnnnnnnnnnnnnnnnnnnnnnnnnnnnnnnnnnnnnnnnnnnnnnnnnnnnnnnnnnnnnnnnnnnnnnnnnnnnnnnnnnnnnnnnnnnnnnnnnnnnnnnnnnnnnnnnnnnnnnnnnnnnnnnnnnnnnnnnnnnnnnnnnnnnnnnnnnnnnnnnnnnnnnnnnnnnnnnnnnnnnnnnnnnnnnnnnnnnnnnnnnnnnnnnnnnnnnnnnnnnnnnnnnnnnnnnnnnnnnnnnnnnnnnnnnnnnnnnnnnnnnnnnnnnnnnnnnnnnnnnnnnnnnnnnnnnnnnnnnnnnnnnnnnnnnnnnnnnnnnnnnnnnnnnnnnnnnnnnnnnnnnnnnnnnnnnnnnnnnnnnnnnnnnnnnnnnnnnnnnnnnnnnnnnnnnnnnnnnnnnnnnnnnnnnnnnnnnnnnnnnnnnnnnnnnnnnnnnnnnnnnnnnnnnnnnnnnnnnnnnnnnnnnnnnnnnnnnnnnnnnnnnnnnnnnnnnnnnnnnnnnnnnnnnnnnnnnnnnnnnnnnnnnnnnnnnnnnnnnnnnnnnnnnnnnnnnnnnnnnnnnnnnnnnnnnnnnnnnnnnnnnnnnnnnnnnnnnnnnnnnnnnnnnnnnnnnnnnnnnnnnnnnnnnnnnnnnnnnnnnnnnnnnnnnnnnnnnnnnnnnnnnnnnnnnnnnnnnnnnnnnnnnnnnnnnnnnnnnnnnnnnnnnnnnnnnnnnnnnnnnnnnnnnnnnnnnnnnnnnnnnnnnnnnnnnnnnnnnnnnnnnnnnnnnnnnnnnnnnnnnnnnnnnnnnnnnnnnnnnnnnnnnnnnnnnnnnnnnnnnnnnnnnnnnnnnnnnnnnnnnnnnnnnnnnnnnnnnnnnnnnnnnnnnnnnnnnnnnnnnnnnnnnnnnnnnnnnnnnnnnnnnnnnnnnnnnnnnnnnnnnnnnnnnnnnnnnnnnnnnnnnnnnnnnnnnnnnnnnnnnnnnnnnnnnnnnnnnnnnnnnnnnnnnnnnnnnnnnnnnnnnnnnnnnnnnnnnnnnnnnnnnnnnnnnnnnnnnnnnnnnnnnnnnnnnnnnnnnnnnnnnnnnnnnnnnnnnnnnnnnnnnnnnnnnnnnnnnnnnnnnnnnnnnnnnnnnnnnnnnnnnnnnnnnnnnnnnnnnnnnnnnnnnnnnnnnnnnnnnnnnnnnnnnnnnnnnnnnnnnnnnnnnnnnnnnnnnnnnnnnnnnnnnnnnnnnnnnnnnnnnnnnnnnnnnnnnnnnnnnnnnnnnnnnnnnnnnnnnnnnnnnnnnnnnnnnnnnnnnnnnnnnnnnnnnnnnnnnnnnnnnnnnnnnnnnnnnnnnnnnnnnnnnnnnnnnnnnnnnnnnnnnnnnnnnnnnnnnnnnnnnnnnnnnnnnnnnnnnnnnnnnnnnnnnnnnnnnnnnnnnnnnnnnnnnnnnnnnnnnnnnnnnnnnnnnnnnnnnnnnnnnnnnnnnnnnnnnnnnnnnnnnnnnnnnnnnnnnnnnnnnnnnnnnnnnnnnnnnnnnnnnnnnnnnnnnnnnnnnnnnnnnnnnnnnnnnnnnnnnnnnnnnnnnnnnnnnnnnnnnnnnnnnnnnnnnnnnnnnnnnnnnnnnnnnnnnnnnnnnnnnnnnnnnnnnnnnnnnnnnnnnnnnnnnnnnnnnnnnnnnnnnnnnnnnnnnnnnnnnnnnnnnnnnnnnnnnnnnnnnnnnnnnnnnnnnnnnnnnnnnnnnnnnnnnnnnnnnnnnnnnnnnnnnnnnnnnnnnnnnnnnnnnnnnnnnnnnnnnnnnnnnnnnnnnnnnnnnnnnnnnnnnnnnnnnnnnnnnnnnnnnnnnnnnnnnnnnnnnnnnnnnnnnnnnnnnnnnnnnnnnnnnnnnnnnnnnnnnnnnnnnnnnnnnnnnnnnnnnnnnnnnnnnnnnnnnnnnnnnnnnnnnnnnnnnnnnnnnnnnnnnnnnnnnnnnnnnnnnnnnnnnnnnnnnnnnnnnnnnnnnnnnnnnnnnnnnnnnnnnnnnnnnnnnnnnnnnnnnnnnnnnnnnnnnnnnnnnnnnnnnnnnnnnnnnnnnnnnnnnnnnnnnnnnnnnnnnnnnnnnnnnnnnnnnnnnnnnnnnnnnnnnnnnnnnnnnnnnnnnnnnnnnnnnnnnnnnnnnnnnnnnnnnnnnnnnnnnnnnnnnnnnnnnnnnnnnnnnnnnnnnnnnnnnnnnnnnnnnnnnnnnnnnnnnnnnnnnnnnnnnnnnnnnnnnnnnnnnnnnnnnnnnnnnnnnnnnnnnnnnnnnnnnnnnnnnnnnnnnnnnnnnnnnnnnnnnnnnnnnnnnnnnnnnnnnnnnnnnnnnnnnnnnnnnnnnnnnnnnnnnnnnnnnnnnnnnnnnnnnnnnnnnnnnnnnnnnnnnnnnnnnnnnnnnnnnnnnnnnnnnnnnnnnnnnnnnnnnnnnnnnnnnnnnnnnnnnnnnnnnnnnnnnnnnnnnnnnnnnnnnnnnnnnnnnnnnnnnnnnnnnnnnnnnnnnnnnnnnnnnnnnnnnnnnnnnnnnnnnnnnnnnnnnnnnnnnnnnnnnnnnnnnnnnnnnnnnnnnnnnnnnnnnnnnnnnnnnnnnnnnnnnnnnnnnnnnnnnnnnnnnnnnnnnnnnnnnnnnnnnnnnnnnnnnnnnnnnnnnnnnnnnnnnnnnnnnnnnnnnnnnnnnnnnnnnnnnnnnnnnnnnnnnnnnnnnnnnnnnnnnnnnnnnnnnnnnnnnnnnnnnnnnnnnnnnnnnnnnnnnnnnnnnnnnnnnnnnnnnnnnnnnnnnnnnnnnnnnnnnnnnnnnnnnnnnnnnnnnnnnnnnnnnnnnnnnnnnnnnnnnnnnnnnnnnnnnnnnnnnnnnnnnnnnnnnnnnnnnnnnnnnnnnnnnnnnnnnnnnnnnnnnnnnnnnnnnnnnnnnnnnnnnnnnnnnnnnnnnnnnnnnnnnnnnnnnnnnnnnnnnnnnnnnnnnnnnnnnnnnnnnnnnnnnnnnnnnnnnnnnnnnnnnnnnnnnnnnnnnnnnnnnnnnnnnnnnnnnnnnnnnnnnnnnnnnnnnnnnnnnnnnnnnnnnnnnnnnnnnnnnnnnnnnnnnnnnnnnnnnnnnnnnnnnnnnnnnnnnnnnnnnnnnnnnnnnnnnnnnnnnnnnnnnnnnnnnnnnnnnnnnnnnnnnnnnnnnnnnnnnnnnnnnnnnnnnnnnnnnnnnnnnnnnnnnnnnnnnnnnnnnnnnnnnnnnnnnnnnnnnnnnnnnnnnnnnnnnnnnnnnnnnnnnnnnnnnnnnnnnnnnnnnnnnnnnnnnnnnnnnnnnnnnnnnnnnnnnnnnnnnnnnnnnnnnnnnnnnnnnnnnnnnnnnnnnnnnnnnnnnnnnnnnnnnnnnnnnnnnnnnnnnnnnnnnnnnnnnnnnnnnnnnnnnnnnnnnnnnnnnnnnnnnnnnnnnnnnnnnnnnnnnnnnnnnnnnnnnnnnnnnnnnnnnnnnnnnnnnnnnnnnnnnnnnnnnnnnnnnnnnnnnnnnnnnnnnnnnnnnnnnnnnnnnnnnnnnnnnnnnnnnnnnnnnnnnnnnnnnnnnnnnnnnnnnnnnnnnnnnnnnnnnnnnnnnnnnnnnnnnnnnnnnnnnnnnnnnnnnnnnnnnnnnnnnnnnnnnnnnnnnnnnnnnnnnnnnnnnnnnnnnnnnnnnnnnnnnnnnnnnnnnnnnnnnnnnnnnnnnnnnnnnnnnnnnnnnnnnnnnnnnnnnnnnnnnnnnnnnnnnnnnnnnnnnnnnnnnnnnnnnnnnnnnnnnnnnnnnnnnnnnnnnnnnnnnnnnnnnnnnnnnnnnnnnnnnnnnnnnnnnnnnnnnnnnnnnnnnnnnnnnnnnnnnnnnnnnnnnnnnnnnnnnnnnnnnnnnnnnnnnnnnnnnnnnnnnnnnnnnnnnnnnnnnnnnnnnnnnnnnnnnnnnnnnnnnnnnnnnnnnnnnnnnnnnnnnnnnnnnnnnnnnnnnnnnnnnnnnnnnnnnnnnnnnnnnnnnnnnnnnnnnnnnnnnnnnnnnnnnnnnnnnnnnnnnnnnnnnnnnnnnnnnnnnnnnnnnnnnnnnnnnnnnnnnnnnnnnnnnnnnnnnnnnnnnnnnnnnnnnnnnnnnnnnnnnnnnnnnnnnnnnnnnnnnnnnnnnnnnnnnnnnnnnnnnnnnnnnnnnnnnnnnnnnnnnnnnnnnnnnnnnnnnnnnnnnnnnnnnnnnnnnnnnnnnnnnnnnnnnnnnnnnnnnnnnnnnnnnnnnnnnnnnnnnnnnnnnnnnnnnnnnnnnnnnnnnnnnnnnnnnnnnnnnnnnnnnnnnnnnnnnnnnnnnnnnnnnnnnnnnnnnnnnnnnnnnnnnnnnnnnnnnnnnnnnnnnnnnnnnnnnnnnnnnnnnnnnnnnnnnnnnnnnnnnnnnnnnnnnnnnnnnnnnnnnnnnnnnnnnnnnnnnnnnnnnnnnnnnnnnnnnnnnnnnnnnnnnnnnnnnnnnnnnnnnnnnnnnnnnnnnnnnnnnnnnnnnnnnnnnnnnnnnnnnnnnnnnnnnnnnnnnnnnnnnnnnnnnnnnnnnnnnnnnnnnnnnnnnnnnnnnnnnnnnnnnnnnnnnnnnnnnnnnnnnnnnnnnnnnnnnnnnnnnnnnnnnnnnnnnnnnnnnnnnnnnnnnnnnnnnnnnnnnnnnnnnnnnnnnnnnnnnnnnnnnnnnnnnnnnnnnnnnnnnnnnnnnnnnnnnnnnnnnnnnnnnnnnnnnnnnnnnnnnnnnnnnnnnnnnnnnnnnnnnnnnnnnnnnnnnnnnnnnnnnnnnnnnnnnnnnnnnnnnnnnnnnnnnnnnnnnnnnnnnnnnnnnnnnnnnnnnnnnnnnnnnnnnnnnnnnnnnnnnnnnnnnnnnnnnnnnnnnnnnnnnnnnnnnnnnnnnnnnnnnnnnnnnnnnnnnnnnnnnnnnnnnnnnnnnnnnnnnnnnnnnnnnnnnnnnnnnnnnnnnnnnnnnnnnnnnnnnnnnnnnnnnnnnnnnnnnnnnnnnnnnnnnnnnnnnnnnnnnnnnnnnnnnnnnnnnnnnnnnnnnnnnnnnnnnnnnnnnnnnnnnnnnnnnnnnnnnnnnnnnnnnnnnnnnnnnnnnnnnnnnnnnnnnnnnnnnnnnnnnnnnnnnnnnnnnnnnnnnnnnnnnnnnnnnnnnnnnnnnnnnnnnnnnnnnnnnnnnnnnnnnnnnnnnnnnnnnnnnnnnnnnnnnnnnnnnnnnnnnnnnnnnnnnnnnnnnnnnnnnnnnnnnnnnnnnnnnnnnnnnnnnnnnnnnnnnnnnnnnnnnnnnnnnnnnnnnnnnnnnnnnnnnnnnnnnnnnnnnnnnnnnnnnnnnnnnnnnnnnnnnnnnnnnnnnnnnnnnnnnnnnnnnnnnnnnnnnnnnnnnnnnnnnnnnnnnnnnnnnnnnnnnnnnnnnnnnnnnnnnnnnnnnnnnnnnnnnnnnnnnnnnnnnnnnnnnnnnnnnnnnnnnnnnnnnnnnnnnnnnnnnnnnnnnnnnnnnnnnnnnnnnnnnnnnnnnnnnnnnnnnnnnnnnnnnnnnnnnnnnnnnnnnnnnnnnnnnnnnnnnnnnnnnnnnnnnnnnnnnnnnnnnnnnnnnnnnnnnnnnnnnnnnnnnnnnnnnnnnnnnnnnnnnnnnnnnnnnnnnnnnnnnnnnnnnnnnnnnnnnnnnnnnnnnnnnnnnnnnnnnnnnnnnnnnnnnnnnnnnnnnnnnnnnnnnnnnnnnnnnnnnnnnnnnnnnnnnnnnnnnnnnnnnnnnnnnnnnnnnnnnnnnnnnnnnnnnnnnnnnnnnnnnnnnnnnnnnnnnnnnnnnnnnnnnnnnnnnnnnnnnnnnnnnnnnnnnnnnnnnnnnnnnnnnnnnnnnnnnnnnnnnnnnnnnnnnnnnnnnnnnnnnnnnnnnnnnnnnnnnnnnnnnnnnnnnnnnnnnnnnnnnnnnnnnnnnnnnnnnnnnnnnnnnnnnnnnnnnnnnnnnnnnnnnnnnnnnnnnnnnnnnnnnnnnnnnnnnnnnnnnnnnnnnnnnnnnnnnnnnnnnnnnnnnnnnnnnnnnnnnnnnnnnnnnnnnnnnnnnnnnnnnnnnnnnnnnnnnnnnnnnnnnnnnnnnnnnnnnnnnnnnnnnnnnnnnnnnnnnnnnnnnnnnnnnnnnnnnnnnnnnnnnnnnnnnnnnnnnnnnnnnnnnnnnnnnnnnnnnnnnnnnnnnnnnnnnnnnnnnnnnnnnnnnnnnnnnnnnnnnnnnnnnnnnnnnnnnnnnnnnnnnnnnnnnnnnnnnnnnnnnnnnnnnnnnnnnnnnnnnnnnnnnnnnnnnnnnnnnnnnnnnnnnnnnnnnnnnnnnnnnnnnnnnnnnnnnnnnnnnnnnnnnnnnnnnnnnnnnnnnnnnnnnnnnnnnnnnnnnnnnnnnnnnnnnnnnnnnnnnnnnnnnnnnnnnnnnnnnnnnnnnnnnnnnnnnnnnnnnnnnnnnnnnnnnnnnnnnnnnnnnnnnnnnnnnnnnnnnnnnnnnnnnnnnnnnnnnnnnnnnnnnnnnnnnnnnnnnnnnnnnnnnnnnnnnnnnnnnnnnnnnnnnnnnnnnnnnnnnnnnnnnnnnnnnnnnnnnnnnnnnnnnnnnnnnnnnnnnnnnnnnnnnnnnnnnnnnnnnnnnnnnnnnnnnnnnnnnnnnnnnnnnnnnnnnnnnnnnnnnnnnnnnnnnnnnnnnnnnnnnnnnnnnnnnnnnnnnnnnnnnnnnnnnnnnnnnnnnnnnnnnnnnnnnnnnnnnnnnnnnnnnnnnnnnnnnnnnnnnnnnnnnnnnnnnnnnnnnnnnnnnnnnnnnnnnnnnnnnnnnnnnnnnnnnnnnnnnnnnnnnnnnnnnnnnnnnnnnnnnnnnnnnnnnnnnnnnnnnnnnnnnnnnnnnnnnnnnnnnnnnnnnnnnnnnnnnnnnnnnnnnnnnnnnnnnnnnnnnnnnnnnnnnnnnnnnnnnnnnnnnnnnnnnnnnnnnnnnnnnnnnnnnnnnnnnnnnnnnnnnnnnnnnnnnnnnnnnnnnnnnnnnnnnnnnnnnnnnnnnnnnnnnnnnnnnnnnnnnnnnnnnnnnnnnnnnnnnnnnnnnnnnnnnnnnnnnnnnnnnnnnnnnnnnnnnnnnnnnnnnnnnnnnnnnnnnnnnnnnnnnnnnnnnnnnnnnnnnnnnnnnnnnnnnnnnnnnnnnnnnnnnnnnnnnnnnnnnnnnnnnnnnnnnnnnnnnnnnnnnnnnnnnnnnnnnnnnnnnnnnnnnnnnnnnnnnnnnnnnnnnnnnnnnnnnnnnnnnnnnnnnnnnnnnnnnnnnnnnnnnnnnnnnnnnnnnnnnnnnnnnnnnnnnnnnnnnnnnnnnnnnnnnnnnnnnnnnnnnnnnnnnnnnnnnnnnnnnnnnnnnnnnnnnnnnnnnnnnnnnnnnnnnnnnnnnnnnnnnnnnnnnnnnnnnnnnnnnnnnnnnnnnnnnnnnnnnnnnnnnnnnnnnnnnnnnnnnnnnnnnnnnnnnnnnnnnnnnnnnnnnnnnnnnnnnnnnnnnnnnnnnnnnnnnnnnnnnnnnnnnnnnnnnnnnnnnnnnnnnnnnnnnnnnnnnnnnnnnnnnnnnnnnnnnnnnnnnnnnnnnnnnnnnnnnnnnnnnnnnnnnnnnnnnnnnnnnnnnnnnnnnnnnnnnnnnnnnnnnnnnnnnnnnnnnnnnnnnnnnnnnnnnnnnnnnnnnnnnnnnnnnnnnnnnnnnnnnnnnnnnnnnnnnnnnnnnnnnnnnnnnnnnnnnnnnnnnnnnnnnnnnnnnnnnnnnnnnnnnnnnnnnnnnnnnnnnnnnnnnnnnnnnnnnnnnnnnnnnnnnnnnnnnnnnnnnnnnnnnnnnnnnnnnnnnnnnnnnnnnnnnnnnnnnnnnnnnnnnnnnnnnnnnnnnnnnnnnnnnnnnnnnnnnnnnnnnnnnnnnnnnnnnnnnnnnnnnnnnnnnnnnnnnnnnnnnnnnnnnnnnnnnnnnnnnnnnnnnnnnnnnnnnnnnnnnnnnnnnnnnnnnnnnnnnnnnnnnnnnnnnnnnnnnnnnnnnnnnnnnnnnnnnnnnnnnnnnnnnnnnnnnnnnnnnnnnnnnnnnnnnnnnnnnnnnnnnnnnnnnnnnnnnnnnnnnnnnnnnnnnnnnnnnnnnnnnnnnnnnnnnnnnnnnnnnnnnnnnnnnnnnnnnnnnnnnnnnnnnnnnnnnnnnnnnnnnnnnnnnnnnnnnnnnnnnnnnnnnnnnnnnnnnnnnnnnnnnnnnnnnnnnnnnnnnnnnnnnnnnnnnnnnnnnnnnnnnnnnnnnnnnnnnnnnnnnnnnnnnnnnnnnnnnnnnnnnnnnnnnnnnnnnnnnnnnnnnnnnnnnnnnnnnnnnnnnnnnnnnnnnnnnnnnnnnnnnnnnnnnnnnnnnnnnnnnnnnnnnnnnnnnnnnnnnnnnnnnnnnnnnnnnnnnnnnnnnnnnnnnnnnnnnnnnnnnnnnnnnnnnnnnnnnnnnnnnnnnnnnnnnnnnnnnnnnnnnnnnnnnnnnnnnnnnnnnnnnnnnnnnnnnnnnnnnnnnnnnnnnnnnnnnnnnnnnnnnnnnnnnnnnnnnnnnnnnnnnnnnnnnnnnnnnnnnnnnnnnnnnnnnnnnnnnnnnnnnnnnnnnnnnnnnnnnnnnnnnnnnnnnnnnnnnnnnnnnnnnnnnnnnnnnnnnnnnnnnnnnnnnnnnnnnnnnnnnnnnnnnnnnnnnnnnnnnnnnnnnnnnnnnnnnnnnnnnnnnnnnnnnnnnnnnnnnnnnnnnnnnnnnnnnnnnnnnnnnnnnnnnnnnnnnnnnnnnnnnnnnnnnnnnnnnnnnnnnnnnnnnnnnnnnnnnnnnnnnnnnnnnnnnnnnnnnnnnnnnnnnnnnnnnnnnnnnnnnnnnnnnnnnnnnnnnnnnnnnnnnnnnnnnnnnnnnnnnnnnnnnnnnnnnnnnnnnnnnnnnnnnnnnnnnnnnnnnnnnnnnnnnnnnnnnnnnnnnnnnnnnnnnnnnnnnnnnnnnnnnnnnnnnnnnnnnnnnnnnnnnnnnnnnnnnnnnnnnnnnnnnnnnnnnnnnnnnnnnnnnnnnnnnnnnnnnnnnnnnnnnnnnnnnnnnnnnnnnnnnnnnnnnnnnnnnnnnnnnnnnnnnnnnnnnnnnnnnnnnnnnnnnnnnnnnnnnnnnnnnnnnnnnnnnnnnnnnnnnnnnnnnnnnnnnnnnnnnnnnnnnnnnnnnnnnnnnnnnnnnnnnnnnnnnnnnnnnnnnnnnnnnnnnnnnnnnnnnnnnnnnnnnnnnnnnnnnnnnnnnnnnnnnnnnnnnnnnnnnnnnnnnnnnnnnnnnnnnnnnnnnnnnnnnnnnnnnnnnnnnnnnnnnnnnnnnnnnnnnnnnnnnnnnnnnnnnnnnnnnnnnnnnnnnnnnnnnnnnnnnnnnnnnnnnnnnnnnnnnnnnnnnnnnnnnnnnnnnnnnnnnnnnnnnnnnnnnnnnnnnnnnnnnnnnnnnnnnnnnnnnnnnnnnnnnnnnnnnnnnnnnnnnnnnnnnnnnnnnnnnnnnnnnnnnnnnnnnnnnnnnnnnnnnnnnnnnnnnnnnnnnnnnnnnnnnnnnnnnnnnnnnnnnnnnnnnnnnnnnnnnnnnnnnnnnnnnnnnnnnnnnnnnnnnnnnnnnnnnnnnnnnnnnnnnnnnnnnnnnnnnnnnnnnnnnnnnnnnnnnnnnnnnnnnnnnnnnnnnnnnnnnnnnnnnnnnnnnnnnnnnnnnnnnnnnnnnnnnnnnnnnnnnnnnnnnnnnnnnnnnnnnnnnnnnnnnnnnnnnnnnnnnnnnnnnnnnnnnnnnnnnnnnnnnnnnnnnnnnnnnnnnnnnnnnnnnnnnnnnnnnnnnnnnnnnnnnnnnnnnnnnnnnnnnnnnnnnnnnnnnnnnnnnnnnnnnnnnnnnnnnnnnnnnnnnnnnnnnnnnnnnnnnnnnnnnnnnnnnnnnnnnnnnnnnnnnnnnnnnnnnnnnnnnnnnnnnnnnnnnnnnnnnnnnnnnnnnnnnnnnnnnnnnnnnnnnnnnnnnnnnnnnnnnnnnnnnnnnnnnnnnnnnnnnnnnnnnnnnnnnnnnnnnnnnnnnnnnnnnnnnnnnnnnnnnnnnnnnnnnnnnnnnnnnnnnnnnnnnnnnnnnnnnnnnnnnnnnnnnnnnnnnnnnnnnnnnnnnnnnnnnnnnnnnnnnnnnnnnnnnnnnnnnnnnnnnnnnnnnnnnnnnnnnnnnnnnnnnnnnnnnnnnnnnnnnnnnnnnnnnnnnnnnnnnnnnnnnnnnnnnnnnnnnnnnnnnnnnnnnnnnnnnnnnnnnnnnnnnnnnnnnnnnnnnnnnnnnnnnnnnnnnnnnnnnnnnnnnnnnnnnnnnnnnnnnnnnnnnnnnnnnnnnnnnnnnnnnnnnnnnnnnnnnnnnnnnnnnnnnnnnnnnnnnnnnnnnnnnnnnnnnnnnnnnnnnnnnnnnnnnnnnnnnnnnnnnnnnnnnnnnnnnnnnnnnnnnnnnnnnnnnnnnnnnnnnnnnnnnnnnnnnnnnnnnnnnnnnnnnnnnnnnnnnnnnnnnnnnnnnnnnnnnnnnnnnnnnnnnnnnnnnnnnnnnnnnnnnnnnnnnnnnnnnnnnnnnnnnnnnnnnnnnnnnnnnnnnnnnnnnnnnnnnnnnnnnnnnnnnnnnnnnnnnnnnnnnnnnnnnnnnnnnnnnnnnnnnnnnnnnnnnnnnnnnnnnnnnnnnnnnnnnnnnnnnnnnnnnnnnnnnnnnnnnnnnnnnnnnnnnnnnnnnnnnnnnnnnnnnnnnnnnnnnnnnnnnnnnnnnnnnnnnnnnnnnnnnnnnnnnnnnnnnnnnnnnnnnnnnnnnnnnnnnnnnnnnnnnnnnnnnnnnnnnnnnnnnnnnnnnnnnnnnnnnnnnnnnnnnnnnnnnnnnnnnnnnnnnnnnnnnnnnnnnnnnnnnnnnnnnnnnnnnnnnnnnnnnnnnnnnnnnnnnnnnnnnnnnnnnnnnnnnnnnnnnnnnnnnnnnnnnnnnnnnnnnnnnnnnnnnnnnnnnnnnnnnnnnnnnnnnnnnnnnnnnnnnnnnnnnnnnnnnnnnnnnnnnnnnnnnnnnnnnnnnnnnnnnnnnnnnnnnnnnnnnnnnnnnnnnnnnnnnnnnnnnnnnnnnnnnnnnnnnnnnnnnnnnnnnnnnnnnnnnnnnnnnnnnnnnnnnnnnnnnnnnnnnnnnnnnnnnnnnnnnnnnnnnnnnnnnnnnnnnnnnnnnnnnnnnnnnnnnnnnnnnnnnnnnnnnnnnnnnnnnnnnnnnnnnnnnnnnnnnnnnnnnnnnnnnnnnnnnnnnnnnnnnnnnnnnnnnnnnnnnnnnnnnnnnnnnnnnnnnnnnnnnnnnnnnnnnnnnnnnnnnnnnnnnnnnnnnnnnnnnnnnnnnnnnnnnnnnnnnnnnnnnnnnnnnnnnnnnnnnnnnnnnnnnnnnnnnnnnnnnnnnnnnnnnnnnnnnnnnnnnnnnnnnnnnnnnnnnnnnnnnnnnnnnnnnnnnnnnnnnnnnnnnnnnnnnnnnnnnnnnnnnnnnnnnnnnnnnnnnnnnnnnnnnnnnnnnnnnnnnnnnnnnnnnnnnnnnnnnnnnnnnnnnnnnnnnnnnnnnnnnnnnnnnnnnnnnnnnnnnnnnnnnnnnnnnnnnnnnnnnnnnnnnnnnnnnnnnnnnnnnnnnnnnnnnnnnnnnnnnnnnnnnnnnnnnnnnnnnnnnnnnnnnnnnnnnnnnnnnnnnnnnnnnnnnnnnnnnnnnnnnnnnnnnnnnnnnnnnnnnnnnnnnnnnnnnnnnnnnnnnnnnnnnnnnnnnnnnnnnnnnnnnnnnnnnnnnnnnnnnnnnnnnnnnnnnnnnnnnnnnnnnnnnnnnnnnnnnnnnnnnnnnnnnnnnnnnnnnnnnnnnnnnnnnnnnnnnnnnnnnnnnnnnnnnnnnnnnnnnnnnnnnnnnnnnnnnnnnnnnnnnnnnnnnnnnnnnnnnnnnnnnnnnnnnnnnnnnnnnnnnnnnnnnnnnnnnnnnnnnnnnnnnnnnnnnnnnnnnnnnnnnnnnnnnnnnnnnnnnnnnnnnnnnnnnnnnnnnnnnnnnnnnnnnnnnnnnnnnnnnnnnnnnnnnnnnnnnnnnnnnnnnnnnnnnnnnnnnnnnnnnnnnnnnnnnnnnnnnnnnnnnnnnnnnnnnnnnnnnnnnnnnnnnnnnnnnnnnnnnnnnnnnnnnnnnnnnnnnnnnnnnnnnnnnnnnnnnnnnnnnnnnnnnnnnnnnnnnnnnnnnnnnnnnnnnnnnnnnnnnnnnnnnnnnnnnnnnnnnnnnnnnnnnnnnnnnnnnnnnnnnnnnnnnnnnnnnnnnnnnnnnnnnnnnnnnnnnnnnnnnnnnnnnnnnnnnnnnnnnnnnnnnnnnnnnnnnnnnnnnnnnnnnnnnnnnnnnnnnnnnnnnnnnnnnnnnnnnnnnnnnnnnnnnnnnnnnnnnnnnnnnnnnnnnnnnnnnnnnnnnnnnnnnnnnnnnnnnnnnnnnnnnnnnnnnnnnnnnnnnnnnnnnnnnnnnnnnnnnnnnnnnnnnnnnnnnnnnnnnnnnnnnnnnnnnnnnnnnnnnnnnnnnnnnnnnnnnnnnnnnnnnnnnnnnnnnnnnnnnnnnnnnnnnnnnnnnnnnnnnnnnnnnnnnnnnnnnnnnnnnnnnnnnnnnnnnnnnnnnnnnnnnnnnnnnnnnnnnnnnnnnnnnnnnnnnnnnnnnnnnnnnnnnnnnnnnnnnnnnnnnnnnnnnnnnnnnnnnnnnnnnnnnnnnnnnnnnnnnnnnnnnnnnnnnnnnnnnnnnnnnnnnnnnnnnnnnnnnnnnnnnnnnnnnnnnnnnnnnnnnnnnnnnnnnnnnnnnnnnnnnnnnnnnnnnnnnnnnnnnnnnnnnnnnnnnnnnnnnnnnnnnnnnnnnnnnnnnnnnnnnnnnnnnnnnnnnnnnnnnnnnnnnnnnnnnnnnnnnnnnnnnnnnnnnnnnnnnnnnnnnnnnnnnnnnnnnnnnnnnnnnnnnnnnnnnnnnnnnnnnnnnnnnnnnnnnnnnnnnnnnnnnnnnnnnnnnnnnnnnnnnnnnnnnnnnnnnnnnnnnnnnnnnnnnnnnnnnnnnnnnnnnnnnnnnnnnnnnnnnnnnnnnnnnnnnnnnnnnnnnnnnnnnnnnnnnnnnnnnnnnnnnnnnnnnnnnnnnnnnnnnnnnnnnnnnnnnnnnnnnnnnnnnnnnnnnnnnnnnnnnnnnnnnnnnnnnnnnnnnnnnnnnnnnnnnnnnnnnnnnnnnnnnnnnnnnnnnnnnnnnnnnnnnnnnnnnnnnnnnnnnnnnnnnnnnnnnnnnnnnnnnnnnnnnnnnnnnnnnnnnnnnnnnnnnnnnnnnnnnnnnnnnnnnnnnnnnnnnnnnnnnnnnnnnnnnnnnnnnnnnnnnnnnnnnnnnnnnnnnnnnnnnnnnnnnnnnnnnnnnnnnnnnnnnnnnnnnnnnnnnnnnnnnnnnnnnnnnnnnnnnnnnnnnnnnnnnnnnnnnnnnnnnnnnnnnnnnnnnnnnnnnnnnnnnnnnnnnnnnnnnnnnnnnnnnnnnnnnnnnnnnnnnnnnnnnnnnnnnnnnnnnnnnnnnnnnnnnnnnnnnnnnnnnnnnnnnnnnnnnnnnnnnnnnnnnnnnnnnnnnnnnnnnnnnnnnnnnnnnnnnnnnnnnnnnnnnnnnnnnnnnnnnnnnnnnnnnnnnnnnnnnnnnnnnnnnnnnnnnnnnnnnnnnnnnnnnnnnnnnnnnnnnnnnnnnnnnnnnnnnnnnnnnnnnnnnnnnnnnnnnnnnnnnnnnnnnnnnnnnnnnnnnnnnnnnnnnnnnnnnnnnnnnnnnnnnnnnnnnnnnnnnnnnnnnnnnnnnnnnnnnnnnnnnnnnnnnnnnnnnnnnnnnnnnnnnnnnnnnnnnnnnnnnnnnnnnnnnnnnnnnnnnnnnnnnnnnnnnnnnnnnnnnnnnnnnnnnnnnnnnnnnnnnnnnnnnnnnnnnnnnnnnnnnnnnnnnnnnnnnnnnnnnnnnnnnnnnnnnnnnnnnnnnnnnnnnnnnnnnnnnnnnnnnnnnnnnnnnnnnnnnnnnnnnnnnnnnnnnnnnnnnnnnnnnnnnnnnnnnnnnnnnnnnnnnnnnnnnnnnnnnnnnnnnnnnnnnnnnnnnnnnnnnnnnnnnnnnnnnnnnnnnnnnnnnnnnnnnnnnnnnnnnnnnnnnnnnnnnnnnnnnnnnnnnnnnnnnnnnnnnnnnnnnnnnnnnnnnnnnnnnnnnnnnnnnnnnnnnnnnnnnnnnnnnnnnnnnnnnnnnnnnnnnnnnnnnnnnnnnnnnnnnnnnnnnnnnnnnnnnnnnnnnnnnnnnnnnnnnnnnnnnnnnnnnnnnnnnnnnnnnnnnnnnnnnnnnnnnnnnnnnnnnnnnnnnnnnnnnnnnnnnnnnnnnnnnnnnnnnnnnnnnnnnnnnnnnnnnnnnnnnnnnnnnnnnnnnnnnnnnnnnnnnnnnnnnnnnnnnnnnnnnnnnnnnnnnnnnnnnnnnnnnnnnnnnnnnnnnnnnnnnnnnnnnnnnnnnnnnnnnnnnnnnnnnnnnnnnnnnnnnnnnnnnnnnnnnnnnnnnnnnnnnnnnnnnnnnnnnnnnnnnnnnnnnnnnnnnnnnnnnnnnnnnnnnnnnnnnnnnnnnnnnnnnnnnnnnnnnnnnnnnnnnnnnnnnnnnnnnnnnnnnnnnnnnnnnnnnnnnnnnnnnnnnnnnnnnnnnnnnnnnnnnnnnnnnnnnnnnnnnnnnnnnnnnnnnnnnnnnnnnnnnnnnnnnnnnnnnnnnnnnnnnnnnnnnnnnnnnnnnnnnnnnnnnnnnnnnnnnnnnnnnnnnnnnnnnnnnnnnnnnnnnnnnnnnnnnnnnnnnnnnnnnnnnnnnnnnnnnnnnnnnnnnnnnnnnnnnnnnnnnnnnnnnnnnnnnnnnnnnnnnnnnnnnnnnnnnnnnnnnnnnnnnnnnnnnnnnnnnnnnnnnnnnnnnnnnnnnnnnnnnnnnnnnnnnnnnnnnnnnnnnnnnnnnnnnnnnnnnnnnnnnnnnnnnnnnnnnnnnnnnnnnnnnnnnnnnnnnnnnnnnnnnnnnnnnnnnnnnnnnnnnnnnnnnnnnnnnnnnnnnnnnnnnnnnnnnnnnnnnnnnnnnnnnnnnnnnnnnnnnnnnnnnnnnnnnnnnnnnnnnnnnnnnnnnnnnnnnnnnnnnnnnnnnnnnnnnnnnnnnnnnnnnnnnnnnnnnnnnnnnnnnnnnnnnnnnnnnnnnnnnnnnnnnnnnnnnnnnnnnnnnnnnnnnnnnnnnnnnnnnnnnnnnnnnnnnnnnnnnnnnnnnnnnnnnnnnnnnnnnnnnnnnnnnnnnnnnnnnnnnnnnnnnnnnnnnnnnnnnnnnnnnnnnnnnnnnnnnnnnnnnnnnnnnnnnnnnnnnnnnnnnnnnnnnnnnnnnnnnnnnnnnnnnnnnnnnnnnnnnnnnnnnnnnnnnnnnnnnnnnnnnnnnnnnnnnnnnnnnnnnnnnnnnnnnnnnnnnnnnnnnnnnnnnnnnnnnnnnnnnnnnnnnnnnnnnnnnnnnnnnnnnnnnnnnnnnnnnnnnnnnnnnnnnnnnnnnnnnnnnnnnnnnnnnnnnnnnnnnnnnnnnnnnnnnnnnnnnnnnnnnnnnnnnnnnnnnnnnnnnnnnnnnnnnnnnnnnnnnnnnnnnnnnnnnnnnnnnnnnnnnnnnnnnnnnnnnnnnnnnnnnnnnnnnnnnnnnnnnnnnnnnnnnnnnnnnnnnnnnnnnnnnnnnnnnnnnnnnnnnnnnnnnnnnnnnnnnnnnnnnnnnnnnnnnnnnnnnnnnnnnnnnnnnnnnnnnnnnnnnnnnnnnnnnnnnnnnnnnnnnnnnnnnnnnnnnnnnnnnnnnnnnnnnnnnnnnnnnnnnnnnnnnnnnnnnnnnnnnnnnnnnnnnnnnnnnnnnnnnnnnnnnnnnnnnnnnnnnnnnnnnnnnnnnnnnnnnnnnnnnnnnnnnnnnnnnnnnnnnnnnnnnnnnnnnnnnnnnnnnnnnnnnnnnnnnnnnnnnnnnnnnnnnnnnnnnnnnnnnnnnnnnnnnnnnnnnnnnnnnnnnnnnnnnnnnnnnnnnnnnnnnnnnnnnnnnnnnnnnnnnnnnnnnnnnnnnnnnnnnnnnnnnnnnnnnnnnnnnnnnnnnnnnnnnnnnnnnnnnnnnnnnnnnnnnnnnnnnnnnnnnnnnnnnnnnnnnnnnnnnnnnnnnnnnnnnnnnnnnnnnnnnnnnnnnnnnnnnnnnnnnnnnnnnnnnnnnnnnnnnnnnnnnnnnnnnnnnnnnnnnnnnnnnnnnnnnnnnnnnnnnnnnnnnnnnnnnnnnnnnnnnnnnnnnnnnnnnnnnnnnnnnnnnnnnnnnnnnnnnnnnnnnnnnnnnnnnnnnnnnnnnnnnnnnnnnnnnnnnnnnnnnnnnnnnnnnnnnnnnnnnnnnnnnnnnnnnnnnnnnnnnnnnnnnnnnnnnnnnnnnnnnnnnnnnnnnnnnnnnnnnnnnnnnnnnnnnnnnnnnnnnnnnnnnnnnnnnnnnnnnnnnnnnnnnnnnnnnnnnnnnnnnnnnnnnnnnnnnnnnnnnnnnnnnnnnnnnnnnnnnnnnnnnnnnnnnnnnnnnnnnnnnnnnnnnnnnnnnnnnnnnnnnnnnnnnnnnnnnnnnnnnnnnnnnnnnnnnnnnnnnnnnnnnnnnnnnnnnnnnnnnnnnnnnnnnnnnnnnnnnnnnnnnnnnnnnnnnnnnnnnnnnnnnnnnnnnnnnnnnnnnnnnnnnnnnnnnnnnnnnnnnnnnnnnnnnnnnnnnnnnnnnnnnnnnnnnnnnnnnnnnnnnnnnnnnnnnnnnnnnnnnnnnnnnnnnnnnnnnnnnnnnnnnnnnnnnnnnnnnnnnnnnnnnnnnnnnnnnnnnnnnnnnnnnnnnnnnnnnnnnnnnnnnnnnnnnnnnnnnnnnnnnnnnnnnnnnnnnnnnnnnnnnnnnnnnnnnnnnnnnnnnnnnnnnnnnnnnnnnnnnnnnnnnnnnnnnnnnnnnnnnnnnnnnnnnnnnnnnnnnnnnnnnnnnnnnnnnnnnnnnnnnnnnnnnnnnnnnnnnnnnnnnnnnnnnnnnnnnnnnnnnnnnnnnnnnnnnnnnnnnnnnnnnnnnnnnnnnnnnnnnnnnnnnnnnnnnnnnnnnnnnnnnnnnnnnnnnnnnnnnnnnnnnnnnnnnnnnnnnnnnnnnnnnnnnnnnnnnnnnnnnnnnnnnnnnnnnnnnnnnnnnnnnnnnnnnnnnnnnnnnnnnnnnnnnnnnnnnnnnnnnnnnnnnnnnnnnnnnnnnnnnnnnnnnnnnnnnnnnnnnnnnnnnnnnnnnnnnnnnnnnnnnnnnnnnnnnnnnnnnnnnnnnnnnnnnnnnnnnnnnnnnnnnnnnnnnnnnnnnnnnnnnnnnnnnnnnnnnnnnnnnnnnnnnnnnnnnnnnnnnnnnnnnnnnnnnnnnnnnnnnnnnnnnnnnnnnnnnnnnnnnnnnnnnnnnnnnnnnnnnnnnnnnnnnnnnnnnnnnnnnnnnnnnnnnnnnnnnnnnnnnnnnnnnnnnnnnnnnnnnnnnnnnnnnnnnnnnnnnnnnnnnnnnnnnnnnnnnnnnnnnnnnnnnnnnnnnnnnnnnnnnnnnnnnnnnnnnnnnnnnnnnnnnnnnnnnnnnnnnnnnnnnnnnnnnnnnnnnnnnnnnnnnnnnnnnnnnnnnnnnnnnnnnnnnnnnnnnnnnnnnnnnnnnnnnnnnnnnnnnnnnnnnnnnnnnnnnnnnnnnnnnnnnnnnnnnnnnnnnnnnnnnnnnnnnnnnnnnnnnnnnnnnnnnnnnnnnnnnnnnnnnnnnnnnnnnnnnnnnnnnnnnnnnnnnnnnnnnnnnnnnnnnnnnnnnnnnnnnnnnnnnnnnnnnnnnnnnnnnnnnnnnnnnnnnnnnnnnnnnnnnnnnnnnnnnnnnnnnnnnnnnnnnnnnnnnnnnnnnnnnnnnnnnnnnnnnnnnnnnnnnnnnnnnnnnnnnnnnnnnnnnnnnnnnnnnnnnnnnnnnnnnnnnnnnnnnnnnnnnnnnnnnnnnnnnnnnnnnnnnnnnnnnnnnnnnnnnnnnnnnnnnnnnnnnnnnnnnnnnnnnnnnnnnnnnnnnnnnnnnnnnnnnnnnnnnnnnnnnnnnnnnnnnnnnnnnnnnnnnnnnnnnnnnnnnnnnnnnnnnnnnnnnnnnnnnnnnnnnnnnnnnnnnnnnnnnnnnnnnnnnnnnnnnnnnnnnnnnnnnnnnnnnnnnnnnnnnnnnnnnnnnnnnnnnnnnnnnnnnnnnnnnnnnnnnnnnnnnnnnnnnnnnnnnnnnnnnnnnnnnnnnnnnnnnnnnnnnnnnnnnnnnnnnnnnnnnnnnnnnnnnnnnnnnnnnnnnnnnnnnnnnnnnnnnnnnnnnnnnnnnnnnnnnnnnnnnnnnnnnnnnnnnnnnnnnnnnnnnnnnnnnnnnnnnnnnnnnnnnnnnnnnnnnnnnnnnnnnnnnnnnnnnnnnnnnnnnnnnnnnnnnnnnnnnnnnnnnnnnnnnnnnnnnnnnnnnnnnnnnnnnnnnnnnnnnnnnnnnnnnnnnnnnnnnnnnnnnnnnnnnnnnnnnnnnnnnnnnnnnnnnnnnnnnnnnnnnnnnnnnnnnnnnnnnnnnnnnnnnnnnnnnnnnnnnnnnnnnnnnnnnnnnnnnnnnnnnnnnnnnnnnnnnnnnnnnnnnnnnnnnnnnnnnnnnnnnnnnnnnnnnnnnnnnnnnnnnnnnnnnnnnnnnnnnnnnnnnnnnnnnnnnnnnnnnnnnnnnnnnnnnnnnnnnnnnnnnnnnnnnnnnnnnnnnnnnnnnnnnnnnnnnnnnnnnnnnnnnnnnnnnnnnnnnnnnnnnnnnnnnnnnnnnnnnnnnnnnnnnnnnnnnnnnnnnnnnnnnnnnnnnnnnnnnnnnnnnnnnnnnnnnnnnnnnnnnnnnnnnnnnnnnnnnnnnnnnnnnnnnnnnnnnnnnnnnnnnnnnnnnnnnnnnnnnnnnnnnnnnnnnnnnnnnnnnnnnnnnnnnnnnnnnnnnnnnnnnnnnnnnnnnnnnnnnnnnnnnnnnnnnnnnnnnnnnnnnnnnnnnnnnnnnnnnnnnnnnnnnnnnnnnnnnnnnnnnnnnnnnnnnnnnnnnnnnnnnnnnnnnnnnnnnnnnnnnnnnnnnnnnnnnnnnnnnnnnnnnnnnnnnnnnnnnnnnnnnnnnnnnnnnnnnnnnnnnnnnnnnnnnnnnnnnnnnnnnnnnnnnnnnnnnnnnnnnnnnnnnnnnnnnnnnnnnnnnnnnnnnnnnnnnnnnnnnnnnnnnnnnnnnnnnnnnnnnnnnnnnnnnnnnnnnnnnnnnnnnnnnnnnnnnnnnnnnnnnnnnnnnnnnnnnnnnnnnnnnnnnnnnnnnnnnnnnnnnnnnnnnnnnnnnnnnnnnnnnnnnnnnnnnnnnnnnnnnnnnnnnnnnnnnnnnnnnnnnnnnnnnnnnnnnnnnnnnnnnnnnnnnnnnnnnnnnnnnnnnnnnnnnnnnnnnnnnnnnnnnnnnnnnnnnnnnnnnnnnnnnnnnnnnnnnnnnnnnnnnnnnnnnnnnnnnnnnnnnnnnnnnnnnnnnnnnnnnnnnnnnnnnnnnnnnnnnnnnnnnnnnnnnnnnnnnnnnnnnnnnnnnnnnnnnnnnnnnnnnnnnnnnnnnnnnnnnnnnnnnnnnnnnnnnnnnnnnnnnnnnnnnnnnnnnnnnnnnnnnnnnnnnnnnnnnnnnnnnnnnnnnnnnnnnnnnnnnnnnnnnnnnnnnnnnnnnnnnnnnnnnnnnnnnnnnnnnnnnnnnnnnnnnnnnnnnnnnnnnnnnnnnnnnnnnnnnnnnnnnnnnnnnnnnnnnnnnnnnnnnnnnnnnnnnnnnnnnnnnnnnnnnnnnnnnnnnnnnnnnnnnnnnnnnnnnnnnnnnnnnnnnnnnnnnnnnnnnnnnnnnnnnnnnnnnnnnnnnnnnnnnnnnnnnnnnnnnnnnnnnnnnnnnnnnnnnnnnnnnnnnnnnnnnnnnnnnnnnnnnnnnnnnnnnnnnnnnnnnnnnnnnnnnnnnnnnnnnnnnnnnnnnnnnnnnnnnnnnnnnnnnnnnnnnnnnnnnnnnnnnnnnnnnnnnnnnnnnnnnnnnnnnnnnnnnnnnnnnnnnnnnnnnnnnnnnnnnnnnnnnnnnnnnnnnnnnnnnnnnnnnnnnnnnnnnnnnnnnnnnnnnnnnnnnnnnnnnnnnnnnnnnnnnnnnnnnnnnnnnnnnnnnnnnnnnnnnnnnnnnnnnnnnnnnnnnnnnnnnnnnnnnnnnnnnnnnnnnnnnnnnnnnnnnnnnnnnnnnnnnnnnnnnnnnnnnnnnnnnnnnnnnnnnnnnnnnnnnnnnnnnnnnnnnnnnnnnnnnnnnnnnnnnnnnnnnnnnnnnnnnnnnnnnnnnnnnnnnnnnnnnnnnnnnnnnnnnnnnnnnnnnnnnnnnnnnnnnnnnnnnnnnnnnnnnnnnnnnnnnnnnnnnnnnnnnnnnnnnnnnnnnnnnnnnnnnnnnnnnnnnnnnnnnnnnnnnnnnnnnnnnnnnnnnnnnnnnnnnnnnnnnnnnnnnnnnnnnnnnnnnnnnnnnnnnnnnnnnnnnnnnnnnnnnnnnnnnnnnnnnnnnnnnnnnnnnnnnnnnnnnnnnnnnnnnnnnnnnnnnnnnnnnnnnnnnnnnnnnnnnnnnnnnnnnnnnnnnnnnnnnnnnnnnnnnnnnnnnnnnnnnnnnnnnnnnnnnnnnnnnnnnnnnnnnnnnnnnnnnnnnnnnnnnnnnnnnnnnnnnnnnnnnnnnnnnnnnnnnnnnnnnnnnnnnnnnnnnnnnnnnnnnnnnnnnnnnnnnnnnnnnnnnnnnnnnnnnnnnnnnnnnnnnnnnnnnnnnnnnnnnnnnnnnnnnnnnnnnnnnnnnnnnnnnnnnnnnnnnnnnnnnnnnnnnnnnnnnnnnnnnnnnnnnnnnnnnnnnnnnnnnnnnnnnnnnnnnnnnnnnnnnnnnnnnnnnnnnnnnnnnnnnnnnnnnnnnnnnnnnnnnnnnnnnnnnnnnnnnnnnnnnnnnnnnnnnnnnnnnnnnnnnnnnnnnnnnnnnnnnnnnnnnnnnnnnnnnnnnnnnnnnnnnnnnnnnnnnnnnnnnnnnnnnnnnnnnnnnnnnnnnnnnnnnnnnnnnnnnnnnnnnnnnnnnnnnnnnnnnnnnnnnnnnnnnnnnnnnnnnnnnnnnnnnnnnnnnnnnnnnnnnnnnnnnnnnnnnnnnnnnnnnnnnnnnnnnnnnnnnnnnnnnnnnnnnnnnnnnnnnnnnnnnnnnnnnnnnnnnnnnnnnnnnnnnnnnnnnnnnnnnnnnnnnnnnnnnnnnnnnnnnnnnnnnnnnnnnnnnnnnnnnnnnnnnnnnnnnnnnnnnnnnnnnnnnnnnnnnnnnnnnnnnnnnnnnnnnnnnnnnnnnnnnnnnnnnnnnnnnnnnnnnnnnnnnnnnnnnnnnnnnnnnnnnnnnnnnnnnnnnnnnnnnnnnnnnnnnnnnnnnnnnnnnnnnnnnnnnnnnnnnnnnnnnnnnnnnnnnnnnnnnnnnnnnnnnnnnnnnnnnnnnnnnnnnnnnnnnnnnnnnnnnnnnnnnnnnnnnnnnnnnnnnnnnnnnnnnnnnnnnnnnnnnnnnnnnnnnnnnnnnnnnnnnnnnnnnnnnnnnnnnnnnnnnnnnnnnnnnnnnnnnnnnnnnnnnnnnnnnnnnnnnnnnnnnnnnnnnnnnnnnnnnnnnnnnnnnnnnnnnnnnnnnnnnnnnnnnnnnnnnnnnnnnnnnnnnnnnnnnnnnnnnnnnnnnnnnnnnnnnnnnnnnnnnnnnnnnnnnnnnnnnnnnnnnnnnnnnnnnnnnnnnnnnnnnnnnnnnnnnnnnnnnnnnnnnnnnnnnnnnnnnnnnnnnnnnnnnnnnnnnnnnnnnnnnnnnnnnnnnnnnnnnnnnnnnnnnnnnnnnnnnnnnnnnnnnnnnnnnnnnnnnnnnnnnnnnnnnnnnnnnnnnnnnnnnnnnnnnnnnnnnnnnnnnnnnnnnnnnnnnnnnnnnnnnnnnnnnnnnnnnnnnnnnnnnnnnnnnnnnnnnnnnnnnnnnnnnnnnnnnnnnnnnnnnnnnnnnnnnnnnnnnnnnnnnnnnnnnnnnnnnnnnnnnnnnnnnnnnnnnnnnnnnnnnnnnnnnnnnnnnnnnnnnnnnnnnnnnnnnnnnnnnnnnnnnnnnnnnnnnnnnnnnnnnnnnnnnnnnnnnnnnnnnnnnnnnnnnnnnnnnnnnnnnnnnnnnnnnnnnnnnnnnnnnnnnnnnnnnnnnnnnnnnnnnnnnnnnnnnnnnnnnnnnnnnnnnnnnnnnnnnnnnnnnnnnnnnnnnnnnnnnnnnnnnnnnnnnnnnnnnnnnnnnnnnnnnnnnnnnnnnnnnnnnnnnnnnnnnnnnnnnnnnnnnnnnnnnnnnnnnnnnnnnnnnnnnnnnnnnnnnnnnnnnnnnnnnnnnnnnnnnnnnnnnnnnnnnnnnnnnnnnnnnnnnnnnnnnnnnnnnnnnnnnnnnnnnnnnnnnnnnnnnnnnnnnnnnnnnnnnnnnnnnnnnnnnnnnnnnnnnnnnnnnnnnnnnnnnnnnnnnnnnnnnnnnnnnnnnnnnnnnnnnnnnnnnnnnnnnnnnnnnnnnnnnnnnnnnnnnnnnnnnnnnnnnnnnnnnnnnnnnnnnnnnnnnnnnnnnnnnnnnnnnnnnnnnnnnnnnnnnnnnnnnnnnnnnnnnnnnnnnnnnnnnnnnnnnnnnnnnnnnnnnnnnnnnnnnnnnnnnnnnnnnnnnnnnnnnnnnnnnnnnnnnnnnnnnnnnnnnnnnnnnnnnnnnnnnnnnnnnnnnnnnnnnnnnnnnnnnnnnnnnnnnnnnnnnnnnnnnnnnnnnnnnnnnnnnnnnnnnnnnnnnnnnnnnnnnnnnnnnnnnnnnnnnnnnnnnnnnnnnnnnnnnnnnnnnnnnnnnnnnnnnnnnnnnnnnnnnnnnnnnnnnnnnnnnnnnnnnnnnnnnnnnnnnnnnnnnnnnnnnnnnnnnnnnnnnnnnnnnnnnnnnnnnnnnnnnnnnnnnnnnnnnnnnnnnnnnnnnnnnnnnnnnnnnnnnnnnnnnnnnnnnnnnnnnnnnnnnnnnnnnnnnnnnnnnnnnnnnnnnnnnnnnnnnnnnnnnnnnnnnnnnnnnnnnnnnnnnnnnnnnnnnnnnnnnnnnnnnnnnnnnnnnnnnnnnnnnnnnnnnnnnnnnnnnnnnnnnnnnnnnnnnnnnnnnnnnnnnnnnnnnnnnnnnnnnnnnnnnnnnnnnnnnnnnnnnnnnnnnnnnnnnnnnnnnnnnnnnnnnnnnnnnnnnnnnnnnnnnnnnnnnnnnnnnnnnnnnnnnnnnnnnnnnnnnnnnnnnnnnnnnnnnnnnnnnnnnnnnnnnnnnnnnnnnnnnnnnnnnnnnnnnnnnnnnnnnnnnnnnnnnnnnnnnnnnnnnnnnnnnnnnnnnnnnnnnnnnnnnnnnnnnnnnnnnnnnnnnnnnnnnnnnnnnnnnnnnnnnnnnnnnnnnnnnnnnnnnnnnnnnnnnnnnnnnnnnnnnnnnnnnnnnnnnnnnnnnnnnnnnnnnnnnnnnnnnnnnnnnnnnnnnnnnnnnnnnnnnnnnnnnnnnnnnnnnnnnnnnnnnnnnnnnnnnnnnnnnnnnnnnnnnnnnnnnnnnnnnnnnnnnnnnnnnnnnnnnnnnnnnnnnnnnnnnnnnnnnnnnnnnnnnnnnnnnnnnnnnnnnnnnnnnnnnnnnnnnnnnnnnnnnnnnnnnnnnnnnnnnnnnnnnnnnnnnnnnnnnnnnnnnnnnnnnnnnnnnnnnnnnnnnnnnnnnnnnnnnnnnnnnnnnnnnnnnnnnnnnnnnnnnnnnnnnnnnnnnnnnnnnnnnnnnnnnnnnnnnnnnnnnnnnnnnnnnnnnnnnnnnnnnnnnnnnnnnnnnnnnnnnnnnnnnnnnnnnnnnnnnnnnnnnnnnnnnnnnnnnnnnnnnnnnnnnnnnnnnnnnnnnnnnnnnnnnnnnnnnnnnnnnnnnnnnnnnnnnnnnnnnnnnnnnnnnnnnnnnnnnnnnnnnnnnnnnnnnnnnnnnnnnnnnnnnnnnnnnnnnnnnnnnnnnnnnnnnnnnnnnnnnnnnnnnnnnnnnnnnnnnnnnnnnnnnnnnnnnnnnnnnnnnnnnnnnnnnnnnnnnnnnnnnnnnnnnnnnnnnnnnnnnnnnnnnnnnnnnnnnnnnnnnnnnnnnnnnnnnnnnnnnnnnnnnnnnnnnnnnnnnnnnnnnnnnnnnnnnnnnnnnnnnnnnnnnnnnnnnnnnnnnnnnnnnnnnnnnnnnnnnnnnnnnnnnnnnnnnnnnnnnnnnnnnnnnnnnnnnnnnnnnnnnnnnnnnnnnnnnnnnnnnnnnnnnnnnnnnnnnnnnnnnnnnnnnnnnnnnnnnnnnnnnnnnnnnnnnnnnnnnnnnnnnnnnnnnnnnnnnnnnnnnnnnnnnnnnnnnnnnnnnnnnnnnnnnnnnnnnnnnnnnnnnnnnnnnnnnnnnnnnnnnnnnnnnnnnnnnnnnnnnnnnnnnnnnnnnnnnnnnnnnnnnnnnnnnnnnnnnnnnnnnnnnnnnnnnnnnnnnnnnnnnnnnnnnnnnnnnnnnnnnnnnnnnnnnnnnnnnnnnnnnnnnnnnnnnnnnnnnnnnnnnnnnnnnnnnnnnnnnnnnnnnnnnnnnnnnnnnnnnnnnnnnnnnnnnnnnnnnnnnnnnnnnnnnnnnnnnnnnnnnnnnnnnnnnnnnnnnnnnnnnnnnnnnnnnnnnnnnnnnnnnnnnnnnnnnnnnnnnnnnnnnnnnnnnnnnnnnnnnnnnnnnnnnnnnnnnnnnnnnnnnnnnnnnnnnnnnnnnnnnnnnnnnnnnnnnnnnnnnnnnnnnnnnnnnnnnnnnnnnnnnnnnnnnnnnnnnnnnnnnnnnnnnnnnnnnnnnnnnnnnnnnnnnnnnnnnnnnnnnnnnnnnnnnnnnnnnnnnnnnnnnnnnnnnnnnnnnnnnnnnnnnnnnnnnnnnnnnnnnnnnnnnnnnnnnnnnnnnnnnnnnnnnnnnnnnnnnnnnnnnnnnnnnnnnnnnnnnnnnnnnnnnnnnnnnnnnnnnnnnnnnnnnnnnnnnnnnnnnnnnnnnnnnnnnnnnnnnnnnnnnnnnnnnnnnnnnnnnnnnnnnnnnnnnnnnnnnnnnnnnnnnnnnnnnnnnnnnnnnnnnnnnnnnnnnnnnnnnnnnnnnnnnnnnnnnnnnnnnnnnnnnnnnnnnnnnnnnnnnnnnnnnnnnnnnnnnnnnnnnnnnnnnnnnnnnnnnnnnnnnnnnnnnnnnnnnnnnnnnnnnnnnnnnnnnnnnnnnnnnnnnnnnnnnnnnnnnnnnnnnnnnnnnnnnnnnnnnnnnnnnnnnnnnnnnnnnnnnnnnnnnnnnnnnnnnnnnnnnnnnnnnnnnnnnnnnnnnnnnnnnnnnnnnnnnnnnnnnnnnnnnnnnnnnnnnnnnnnnnnnnnnnnnnnnnnnnnnnnnnnnnnnnnnnnnnnnnnnnnnnnnnnnnnnnnnnnnnnnnnnnnnnnnnnnnnnnnnnnnnnnnnnnnnnnnnnnnnnnnnnnnnnnnnnnnnnnnnnnnnnnnnnnnnnnnnnnnnnnnnnnnnnnnnnnnnnnnnnnnnnnnnnnnnnnnnnnnnnnnnnnnnnnnnnnnnnnnnnnnnnnnnnnnnnnnnnnnnnnnnnnnnnnnnnnnnnnnnnnnnnnnnnnnnnnnnnnnnnnnnnnnnnnnnnnnnnnnnnnnnnnnnnnnnnnnnnnnnnnnnnnnnnnnnnnnnnnnnnnnnnnnnnnnnnnnnnnnnnnnnnnnnnnnnnnnnnnnnnnnnnnnnnnnnnnnnnnnnnnnnnnnnnnnnnnnnnnnnnnnnnnnnnnnnnnnnnnnnnnnnnnnnnnnnnnnnnnnnnnnnnnnnnnnnnnnnnnnnnnnnnnnnnnnnnnnnnnnnnnnnnnnnnnnnnnnnnnnnnnnnnnnnnnnnnnnnnnnnnnnnnnnnnnnnnnnnnnnnnnnnnnnnnnnnnnnnnnnnnnnnnnnnnnnnnnnnnnnnnnnnnnnnnnnnnnnnnnnnnnnnnnnnnnnnnnnnnnnnnnnnnnnnnnnnnnnnnnnnnnnnnnnnnnnnnnnnnnnnnnnnnnnnnnnnnnnnnnnnnnnnnnnnnnnnnnnnnnnnnnnnnnnnnnnnnnnnnnnnnnnnnnnnnnnnnnnnnnnnnnnnnnnnnnnnnnnnnnnnnnnnnnnnnnnnnnnnnnnnnnnnnnnnnnnnnnnnnnnnnnnnnnnnnnnnnnnnnnnnnnnnnnnnnnnnnnnnnnnnnnnnnnnnnnnnnnnnnnnnnnnnnnnnnnnnnnnnnnnnnnnnnnnnnnnnnnnnnnnnnnnnnnnnnnnnnnnnnnnnnnnnnnnnnnnnnnnnnnnnnnnnnnnnnnnnnnnnnnnnnnnnnnnnnnnnnnnnnnnnnnnnnnnnnnnnnnnnnnnnnnnnnnnnnnnnnnnnnnnnnnnnnnnnnnnnnnnnnnnnnnnnnnnnnnnnnnnnnnnnnnnnnnnnnnnnnnnnnnnnnnnnnnnnnnnnnnnnnnnnnnnnnnnnnnnnnnnnnnnnnnnnnnnnnnnnnnnnnnnnnnnnnnnnnnnnnnnnnnnnnnnnnnnnnnnnnnnnnnnnnnnnnnnnnnnnnnnnnnnnnnnnnnnnnnnnnnnnnnnnnnnnnnnnnnnnnnnnnnnnnnnnnnnnnnnnnnnnnnnnnnnnnnnnnnnnnnnnnnnnnnnnnnnnnnnnnnnnnnnnnnnnnnnnnnnnnnnnnnnnnnnnnnnnnnnnnnnnnnnnnnnnnnnnnnnnnnnnnnnnnnnnnnnnnnnnnnnnnnnnnnnnnnnnnnnnnnnnnnnnnnnnnnnnnnnnnnnnnnnnnnnnnnnnnnnnnnnnnnnnnnnnnnnnnnnnnnnnnnnnnnnnnnnnnnnnnnnnnnnnnnnnnnnnnnnnnnnnnnnnnnnnnnnnnnnnnnnnnnnnnnnnnnnnnnnnnnnnnnnnnnnnnnnnnnnnnnnnnnnnnnnnnnnnnnnnnnnnnnnnnnnnnnnnnnnnnnnnnnnnnnnnnnnnnnnnnnnnnnnnnnnnnnnnnnnnnnnnnnnnnnnnnnnnnnnnnnnnnnnnnnnnnnnnnnnnnnnnnnnnnnnnnnnnnnnnnnnnnnnnnnnnnnnnnnnnnnnnnnnnnnnnnnnnnnnnnnnnnnnnnnnnnnnnnnnnnnnnnnnnnnnnnnnnnnnnnnnnnnnnnnnnnnnnnnnnnnnnnnnnnnnnnnnnnnnnnnnnnnnnnnnnnnnnnnnnnnnnnnnnnnnnnnnnnnnnnnnnnnnnnnnnnnnnnnnnnnnnnnnnnnnnnnnnnnnnnnnnnnnnnnnnnnnnnnnnnnnnnnnnnnnnnnnnnnnnnnnnnnnnnnnnnnnnnnnnnnnnnnnnnnnnnnnnnnnnnnnnnnnnnnnnnnnnnnnnnnnnnnnnnnnnnnnnnnnnnnnnnnnnnnnnnnnnnnnnnnnnnnnnnnnnnnnnnnnnnnnnnnnnnnnnnnnnnnnnnnnnnnnnnnnnnnnnnnnnnnnnnnnnnnnnnnnnnnnnnnnnnnnnnnnnnnnnnnnnnnnnnnnnnnnnnnnnnnnnnnnnnnnnnnnnnnnnnnnnnnnnnnnnnnnnnnnnnnnnnnnnnnnnnnnnnnnnnnnnnnnnnnnnnnnnnnnnnnnnnnnnnnnnnnnnnnnnnnnnnnnnnnnnnnnnnnnnnnnnnnnnnnnnnnnnnnnnnnnnnnnnnnnnnnnnnnnnnnnnnnnnnnnnnnnnnnnnnnnnnnnnnnnnnnnnnnnnnnnnnnnnnnnnnnnnnnnnnnnnnnnnnnnnnnnnnnnnnnnnnnnnnnnnnnnnnnnnnnnnnnnnnnnnnnnnnnnnnnnnnnnnnnnnnnnnnnnnnnnnnnnnnnnnnnnnnnnnnnnnnnnnnnnnnnnnnnnnnnnnnnnnnnnnnnnnnnnnnnnnnnnnnnnnnnnnnnnnnnnnnnnnnnnnnnnnnnnnnnnnnnnnnnnnnnnnnnnnnnnnnnnnnnnnnnnnnnnnnnnnnnnnnnnnnnnnnnnnnnnnnnnnnnnnnnnnnnnnnnnnnnnnnnnnnnnnnnnnnnnnnnnnnnnnnnnnnnnnnnnnnnnnnnnnnnnnnnnnnnnnnnnnnnnnnnnnnnnnnnnnnnnnnnnnnnnnnnnnnnnnnnnnnnnnnnnnnnnnnnnnnnnnnnnnnnnnnnnnnnnnnnnnnnnnnnnnnnnnnnnnnnnnnnnnnnnnnnnnnnnnnnnnnnnnnnnnnnnnnnnnnnnnnnnnnnnnnnnnnnnnnnnnnnnnnnnnnnnnnnnnnnnnnnnnnnnnnnnnnnnnnnnnnnnnnnnnnnnnnnnnnnnnnnnnnnnnnnnnnnnnnnnnnnnnnnnnnnnnnnnnnnnnnnnnnnnnnnnnnnnnnnnnnnnnnnnnnnnnnnnnnnnnnnnnnnnnnnnnnnnnnnnnnnnnnnnnnnnnnnnnnnnnnnnnnnnnnnnnnnnnnnnnnnnnnnnnnnnnnnnnnnnnnnnnnnnnnnnnnnnnnnnnnnnnnnnnnnnnnnnnnnnnnnnnnnnnnnnnnnnnnnnnnnnnnnnnnnnnnnnnnnnnnnnnnnnnnnnnnnnnnnnnnnnnnnnnnnnnnnnnnnnnnnnnnnnnnnnnnnnnnnnnnnnnnnnnnnnnnnnnnnnnnnnnnnnnnnnnnnnnnnnnnnnnnnnnnnnnnnnnnnnnnnnnnnnnnnnnnnnnnnnnnnnnnnnnnnnnnnnnnnnnnnnnnnnnnnnnnnnnnnnnnnnnnnnnnnnnnnnnnnnnnnnnnnnnnnnnnnnnnnnnnnnnnnnnnnnnnnnnnnnnnnnnnnnnnnnnnnnnnnnnnnnnnnnnnnnnnnnnnnnnnnnnnnnnnnnnnnnnnnnnnnnnnnnnnnnnnnnnnnnnnnnnnnnnnnnnnnnnnnnnnnnnnnnnnnnnnnnnnnnnnnnnnnnnnnnnnnnnnnnnnnnnnnnnnnnnnnnnnnnnnnnnnnnnnnnnnnnnnnnnnnnnnnnnnnnnnnnnnnnnnnnnnnnnnnnnnnnnnnnnnnnnnnnnnnnnnnnnnnnnnnnnnnnnnnnnnnnnnnnnnnnnnnnnnnnnnnnnnnnnnnnnnnnnnnnnnnnnnnnnnnnnnnnnnnnnnnnnnnnnnnnnnnnnnnnnnnnnnnnnnnnnnnnnnnnnnnnnnnnnnnnnnnnnnnnnnnnnnnnnnnnnnnnnnnnnnnnnnnnnnnnnnnnnnnnnnnnnnnnnnnnnnnnnnnnnnnnnnnnnnnnnnnnnnnnnnnnnnnnnnnnnnnnnnnnnnnnnnnnnnnnnnnnnnnnnnnnnnnnnnnnnnnnnnnnnnnnnnnnnnnnnnnnnnnnnnnnnnnnnnnnnnnnnnnnnnnnnnnnnnnnnnnnnnnnnnnnnnnnnnnnnnnnnnnnnnnnnnnnnnnnnnnnnnnnnnnnnnnnnnnnnnnnnnnnnnnnnnnnnnnnnnnnnnnnnnnnnnnnnnnnnnnnnnnnnnnnnnnnnnnnnnnnnnnnnnnnnnnnnnnnnnnnnnnnnnnnnnnnnnnnnnnnnnnnnnnnnnnnnnnnnnnnnnnnnnnnnnnnnnnnnnnnnnnnnnnnnnnnnnnnnnnnnnnnnnnnnnnnnnnnnnnnnnnnnnnnnnnnnnnnnnnnnnnnnnnnnnnnnnnnnnnnnnnnnnnnnnnnnnnnnnnnnnnnnnnnnnnnnnnnnnnnnnnnnnnnnnnnnnnnnnnnnnnnnnnnnnnnnnnnnnnnnnnnnnnnnnnnnnnnnnnnnnnnnnnnnnnnnnnnnnnnnnnnnnnnnnnnnnnnnnnnnnnnnnnnnnnnnnnnnnnnnnnnnnnnnnnnnnnnnnnnnnnnnnnnnnnnnnnnnnnnnnnnnnnnnnnnnnnnnnnnnnnnnnnnnnnnnnnnnnnnnnnnnnnnnnnnnnnnnnnnnnnnnnnnnnnnnnnnnnnnnnnnnnnnnnnnnnnnnnnnnnnnnnnnnnnnnnnnnnnnnnnnnnnnnnnnnnnnnnnnnnnnnnnnnnnnnnnnnnnnnnnnnnnnnnnnnnnnnnnnnnnnnnnnnnnnnnnnnnnnnnnnnnnnnnnnnnnnnnnnnnnnnnnnnnnnnnnnnnnnnnnnnnnnnnnnnnnnnnnnnnnnnnnnnnnnnnnnnnnnnnnnnnnnnnnnnnnnnnnnnnnnnnnnnnnnnnnnnnnnnnnnnnnnnnnnnnnnnnnnnnnnnnnnnnnnnnnnnnnnnnnnnnnnnnnnnnnnnnnnnnnnnnnnnnnnnnnnnnnnnnnnnnnnnnnnnnnnnnnnnnnnnnnnnnnnnnnnnnnnnnnnnnnnnnnnnnnnnnnnnnnnnnnnnnnnnnnnnnnnnnnnnnnnnnnnnnnnnnnnnnnnnnnnnnnnnnnnnnnnnnnnnnnnnnnnnnnnnnnnnnnnnnnnnnnnnnnnnnnnnnnnnnnnnnnnnnnnnnnnnnnnnnnnnnnnnnnnnnnnnnnnnnnnnnnnnnnnnnnnnnnnnnnnnnnnnnnnnnnnnnnnnnnnnnnnnnnnnnnnnnnnnnnnnnnnnnnnnnnnnnnnnnnnnnnnnnnnnnnnnnnnnnnnnnnnnnnnnnnnnnnnnnnnnnnnnnnnnnnnnnnnnnnnnnnnnnnnnnnnnnnnnnnnnnnnnnnnnnnnnnnnnnnnnnnnnnnnnnnnnnnnnnnnnnnnnnnnnnnnnnnnnnnnnnnnnnnnnnnnnnnnnnnnnnnnnnnnnnnnnnnnnnnnnnnnnnnnnnnnnnnnnnnnnnnnnnnnnnnnnnnnnnnnnnnnnnnnnnnnnnnnnnnnnnnnnnnnnnnnnnnnnnnnnnnnnnnnnnnnnnnnnnnnnnnnnnnnnnnnnnnnnnnnnnnnnnnnnnnnnnnnnnnnnnnnnnnnnnnnnnnnnnnnnnnnnnnnnnnnnnnnnnnnnnnnnnnnnnnnnnnnnnnnnnnnnnnnnnnnnnnnnnnnnnnnnnnnnnnnnnnnnnnnnnnnnnnnnnnnnnnnnnnnnnnnnnnnnnnnnnnnnnnnnnnnnnnnnnnnnnnnnnnnnnnnnnnnnnnnnnnnnnnnnnnnnnnnnnnnnnnnnnnnnnnnnnnnnnnnnnnnnnnnnnnnnnnnnnnnnnnnnnnnnnnnnnnnnnnnnnnnnnnnnnnnnnnnnnnnnnnnnnnnnnnnnnnnnnnnnnnnnnnnnnnnnnnnnnnnnnnnnnnnnnnnnnnnnnnnnnnnnnnnnnnnnnnnnnnnnnnnnnnnnnnnnnnnnnnnnnnnnnnnnnnnnnnnnnnnnnnnnnnnnnnnnnnnnnnnnnnnnnnnnnnnnnnnnnnnnnnnnnnnnnnnnnnnnnnnnnnnnnnnnnnnnnnnnnnnnnnnnnnnnnnnnnnnnnnnnnnnnnnnnnnnnnnnnnnnnnnnnnnnnnnnnnnnnnnnnnnnnnnnnnnnnnnnnnnnnnnnnnnnnnnnnnnnnnnnnnnnnnnnnnnnnnnnnnnnnnnnnnnnnnnnnnnnnnnnnnnnnnnnnnnnnnnnnnnnnnnnnnnnnnnnnnnnnnnnnnnnnnnnnnnnnnnnnnnnnnnnnnnnnnnnnnnnnnnnnnnnnnnnnnnnnnnnnnnnnnnnnnnnnnnnnnnnnnnnnnnnnnnnnnnnnnnnnnnnnnnnnnnnnnnnnnnnnnnnnnnnnnnnnnnnnnnnnnnnnnnnnnnnnnnnnnnnnnnnnnnnnnnnnnnnnnnnnnnnnnnnnnnnnnnnnnnnnnnnnnnnnnnnnnnnnnnnnnnnnnnnnnnnnnnnnnnnnnnnnnnnnnnnnnnnnnnnnnnnnnnnnnnnnnnnnnnnnnnnnnnnnnnnnnnnnnnnnnnnnnnnnnnnnnnnnnnnnnnnnnnnnnnnnnnnnnnnnnnnnnnnnnnnnnnnnnnnnnnnnnnnnnnnnnnnnnnnnnnnnnnnnnnnnnnnnnnnnnnnnnnnnnnnnnnnnnnnnnnnnnnnnnnnnnnnnnnnnnnnnnnnnnnnnnnnnnnnnnnnnnnnnnnnnnnnnnnnnnnnnnnnnnnnnnnnnnnnnnnnnnnnnnnnnnnnnnnnnnnnnnnnnnnnnnnnnnnnnnnnnnnnnnnnnnnnnnnnnnnnnnnnnnnnnnnnnnnnnnnnnnnnnnnnnnnnnnnnnnnnnnnnnnnnnnnnnnnnnnnnnnnnnnnnnnnnnnnnnnnnnnnnnnnnnnnnnnnnnnnnnnnnnnnnnnnnnnnnnnnnnnnnnnnnnnnnnnnnnnnnnnnnnnnnnnnnnnnnnnnnnnnnnnnnnnnnnnnnnnnnnnnnnnnnnnnnnnnnnnnnnnnnnnnnnnnnnnnnnnnnnnnnnnnnnnnnnnnnnnnnnnnnnnnnnnnnnnnnnnnnnnnnnnnnnnnnnnnnnnnnnnnnnnnnnnnnnnnnnnnnnnnnnnnnnnnnnnnnnnnnnnnnnnnnnnnnnnnnnnnnnnnnnnnnnnnnnnnnnnnnnnnnnnnnnnnnnnnnnnnnnnnnnnnnnnnnnnnnnnnnnnnnnnnnnnnnnnnnnnnnnnnnnnnnnnnnnnnnnnnnnnnnnnnnnnnnnnnnnnnnnnnnnnnnnnnnnnnnnnnnnnnnnnnnnnnnnnnnnnnnnnnnnnnnnnnnnnnnnnnnnnnnnnnnnnnnnnnnnnnnnnnnnnnnnnnnnnnnnnnnnnnnnnnnnnnnnnnnnnnnnnnnnnnnnnnnnnnnnnnnnnnnnnnnnnnnnnnnnnnnnnnnnnnnnnnnnnnnnnnnnnnnnnnnnnnnnnnnnnnnnnnnnnnnnnnnnnnnnnnnnnnnnnnnnnnnnnnnnnnnnnnnnnnnnnnnnnnnnnnnnnnnnnnnnnnnnnnnnnnnnnnnnnnnnnnnnnnnnnnnnnnnnnnnnnnnnnnnnnnnnnnnnnnnnnnnnnnnnnnnnnnnnnnnnnnnnnnnnnnnnnnnnnnnnnnnnnnnnnnnnnnnnnnnnnnnnnnnnnnnnnnnnnnnnnnnnnnnnnnnnnnnnnnnnnnnnnnnnnnnnnnnnnnnnnnnnnnnnnnnnnnnnnnnnnnnnnnnnnnnnnnnnnnnnnnnnnnnnnnnnnnnnnnnnnnnnnnnnnnnnnnnnnnnnnnnnnnnnnnnnnnnnnnnnnnnnnnnnnnnnnnnnnnnnnnnnnnnnnnnnnnnnnnnnnnnnnnnnnnnnnnnnnnnnnnnnnnnnnnnnnnnnnnnnnnnnnnnnnnnnnnnnnnnnnnnnnnnnnnnnnnnnnnnnnnnnnnnnnnnnnnnnnnnnnnnnnnnnnnnnnnnnnnnnnnnnnnnnnnnnnnnnnnnnnnnnnnnnnnnnnnnnnnnnnnnnnnnnnnnnnnnnnnnnnnnnnnnnnnnnnnnnnnnnnnnnnnnnnnnnnnnnnnnnnnnnnnnnnnnnnnnnnnnnnnnnnnnnnnnnnnnnnnnnnnnnnnnnnnnnnnnnnnnnnnnnnnnnnnnnnnnnnnnnnnnnnnnnnnnnnnnnnnnnnnnnnnnnnnnnnnnnnnnnnnnnnnnnnnnnnnnnnnnnnnnnnnnnnnnnnnnnnnnnnnnnnnnnnnnnnnnnnnnnnnnnnnnnnnnnnnnnnnnnnnnnnnnnnnnnnnnnnnnnnnnnnnnnnnnnnnnnnnnnnnnnnnnnnnnnnnnnnnnnnnnnnnnnnnnnnnnnnnnnnnnnnnnnnnnnnnnnnnnnnnnnnnnnnnnnnnnnnnnnnnnnnnnnnnnnnnnnnnnnnnnnnnnnnnnnnnnnnnnnnnnnnnnnnnnnnnnnnnnnnnnnnnnnnnnnnnnnnnnnnnnnnnnnnnnnnnnnnnnnnnnnnnnnnnnnnnnnnnnnnnnnnnnnnnnnnnnnnnnnnnnnnnnnnnnnnnnnnnnnnnnnnnnnnnnnnnnnnnnnnnnnnnnnnnnnnnnnnnnnnnnnnnnnnnnnnnnnnnnnnnnnnnnnnnnnnnnnnnnnnnnnnnnnnnnnnnnnnnnnnnnnnnnnnnnnnnnnnnnnnnnnnnnnnnnnnnnnnnnnnnnnnnnnnnnnnnnnnnnnnnnnnnnnnnnnnnnnnnnnnnnnnnnnnnnnnnnnnnnnnnnnnnnnnnnnnnnnnnnnnnnnnnnnnnnnnnnnnnnnnnnnnnnnnnnnnnnnnnnnnnnnnnnnnnnnnnnnnnnnnnnnnnnnnnnnnnnnnnnnnnnnnnnnnnnnnnnnnnnnnnnnnnnnnnnnnnnnnnnnnnnnnnnnnnnnnnnnnnnnnnnnnnnnnnnnnnnnnnnnnnnnnnnnnnnnnnnnnnnnnnnnnnnnnnnnnnnnnnnnnnnnnnnnnnnnnnnnnnnnnnnnnnnnnnnnnnnnnnnnnnnnnnnnnnnnnnnnnnnnnnnnnnnnnnnnnnnnnnnnnnnnnnnnnnnnnnnnnnnnnnnnnnnnnnnnnnnnnnnnnnnnnnnnnnnnnnnnnnnnnnnnnnnnnnnnnnnnnnnnnnnnnnnnnnnnnnnnnnnnnnnnnnnnnnnnnnnnnnnnnnnnnnnnnnnnnnnnnnnnnnnnnnnnnnnnnnnnnnnnnnnnnnnnnnnnnnnnnnnnnnnnnnnnnnnnnnnnnnnnnnnnnnnnnnnnnnnnnnnnnnnnnnnnnnnnnnnnnnnnnnnnnnnnnnnnnnnnnnnnnnnnnnnnnnnnnnnnnnnnnnnnnnnnnnnnnnnnnnnnnnnnnnnnnnnnnnnnnnnnnnnnnnnnnnnnnnnnnnnnnnnnnnnnnnnnnnnnnnnnnnnnnnnnnnnnnnnnnnnnnnnnnnnnnnnnnnnnnnnnnnnnnnnnnnnnnnnnnnnnnnnnnnnnnnnnnnnnnnnnnnnnnnnnnnnnnnnnnnnnnnnnnnnnnnnnnnnnnnnnnnnnnnnnnnnnnnnnnnnnnnnnnnnnnnnnnnnnnnnnnnnnnnnnnnnnnnnnnnnnnnnnnnnnnnnnnnnnnnnnnnnnnnnnnnnnnnnnnnnnnnnnnnnnnnnnnnnnnnnnnnnnnnnnnnnnnnnnnnnnnnnnnnnnnnnnnnnnnnnnnnnnnnnnnnnnnnnnnnnnnnnnnnnnnnnnnnnnnnnnnnnnnnnnnnnnnnnnnnnnnnnnnnnnnnnnnnnnnnnnnnnnnnnnnnnnnnnnnnnnnnnnnnnnnnnnnnnnnnnnnnnnnnnnnnnnnnnnnnnnnnnnnnnnnnnnnnnnnnnnnnnnnnnnnnnnnnnnnnnnnnnnnnnnnnnnnnnnnnnnnnnnnnnnnnnnnnnnnnnnnnnnnnnnnnnnnnnnnnnnnnnnnnnnnnnnnnnnnnnnnnnnnnnnnnnnnnnnnnnnnnnnnnnnnnnnnnnnnnnnnnnnnnnnnnnnnnnnnnnnnnnnnnnnnnnnnnnnnnnnnnnnnnnnnnnnnnnnnnnnnnnnnnnnnnnnnnnnnnnnnnnnnnnnnnnnnnnnnnnnnnnnnnnnnnnnnnnnnnnnnnnnnnnnnnnnnnnnnnnnnnnnnnnnnnnnnnnnnnnnnnnnnnnnnnnnnnnnnnnnnnnnnnnnnnnnnnnnnnnnnnnnnnnnnnnnnnnnnnnnnnnnnnnnnnnnnnnnnnnnnnnnnnnnnnnnnnnnnnnnnnnnnnnnnnnnnnnnnnnnnnnnnnnnnnnnnnnnnnnnnnnnnnnnnnnnnnnnnnnnnnnnnnnnnnnnnnnnnnnnnnnnnnnnnnnnnnnnnnnnnnnnnnnnnnnnnnnnnnnnnnnnnnnnnnnnnnnnnnnnnnnnnnnnnnnnnnnnnnnnnnnnnnnnnnnnnnnnnnnnnnnnnnnnnnnnnnnnnnnnnnnnnnnnnnnnnnnnnnnnnnnnnnnnnnnnnnnnnnnnnnnnnnnnnnnnnnnnnnnnnnnnnnnnnnnnnnnnnnnnnnnnnnnnnnnnnnnnnnnnnnnnnnnnnnnnnnnnnnnnnnnnnnnnnnnnnnnnnnnnnnnnnnnnnnnnnnnnnnnnnnnnnnnnnnnnnnnnnnnnnnnnnnnnnnnnnnnnnnnnnnnnnnnnnnnnnnnnnnnnnnnnnnnnnnnnnnnnnnnnnnnnnnnnnnnnnnnnnnnnnnnnnnnnnnnnnnnnnnnnnnnnnnnnnnnnnnnnnnnnnnnnnnnnnnnnnnnnnnnnnnnnnnnnnnnnnnnnnnnnnnnnnnnnnnnnnnnnnnnnnnnnnnnnnnnnnnnnnnnnnnnnnnnnnnnnnnnnnnnnnnnnnnnnnnnnnnnnnnnnnnnnnnnnnnnnnnnnnnnnnnnnnnnnnnnnnnnnnnnnnnnnnnnnnnnnnnnnnnnnnnnnnnnnnnnnnnnnnnnnnnnnnnnnnnnnnnnnnnnnnnnnnnnnnnnnnnnnnnnnnnnnnnnnnnnnnnnnnnnnnnnnnnnnnnnnnnnnnnnnnnnnnnnnnnnnnnnnnnnnnnnnnnnnnnnnnnnnnnnnnnnnnnnnnnnnnnnnnnnnnnnnnnnnnnnnnnnnnnnnnnnnnnnnnnnnnnnnnnnnnnnnnnnnnnnnnnnnnnnnnnnnnnnnnnnnnnnnnnnnnnnnnnnnnnnnnnnnnnnnnnnnnnnnnnnnnnnnnnnnnnnnnnnnnnnnnnnnnnnnnnnnnnnnnnnnnnnnnnnnnnnnnnnnnnnnnnnnnnnnnnnnnnnnnnnnnnnnnnnnnnnnnnnnnnnnnnnnnnnnnnnnnnnnnnnnnnnnnnnnnnnnnnnnnnnnnnnnnnnnnnnnnnnnnnnnnnnnnnnnnnnnnnnnnnnnnnnnnnnnnnnnnnnnnnnnnnnnnnnnnnnnnnnnnnnnnnnnnnnnnnnnnnnnnnnnnnnnnnnnnnnnnnnnnnnnnnnnnnnnnnnnnnnnnnnnnnnnnnnnnnnnnnnnnnnnnnnnnnnnnnnnnnnnnnnnnnnnnnnnnnnnnnnnnnnnnnnnnnnnnnnnnnnnnnnnnnnnnnnnnnnnnnnnnnnnnnnnnnnnnnnnnnnnnnnnnnnnnnnnnnnnnnnnnnnnnnnnnnnnnnnnnnnnnnnnnnnnnnnnnnnnnnnnnnnnnnnnnnnnnnnnnnnnnnnnnnnnnnnnnnnnnnnnnnnnnnnnnnnnnnnnnnnnnnnnnnnnnnnnnnnnnnnnnnnnnnnnnnnnnnnnnnnnnnnnnnnnnnnnnnnnnnnnnnnnnnnnnnnnnnnnnnnnnnnnnnnnnnnnnnnnnnnnnnnnnnnnnnnnnnnnnnnnnnnnnnnnnnnnnnnnnnnnnnnnnnnnnnnnnnnnnnnnnnnnnnnnnnnnnnnnnnnnnnnnnnnnnnnnnnnnnnnnnnnnnnnnnnnnnnnnnnnnnnnnnnnnnnnnnnnnnnnnnnnnnnnnnnnnnnnnnnnnnnnnnnnnnnnnnnnnnnnnnnnnnnnnnnnnnnnnnnnnnnnnnnnnnnnnnnnnnnnnnnnnnnnnnnnnnnnnnnnnnnnnnnnnnnnnnnnnnnnnnnnnnnnnnnnnnnnnnnnnnnnnnnnnnnnnnnnnnnnnnnnnnnnnnnnnnnnnnnnnnnnnnnnnnnnnnnnnnnnnnnnnnnnnnnnnnnnnnnnnnnnnnnnnnnnnnnnnnnnnnnnnnnnnnnnnnnnnnnnnnnnnnnnnnnnnnnnnnnnnnnnnnnnnnnnnnnnnnnnnnnnnnnnnnnnnnnnnnnnnnnnnnnnnnnnnnnnnnnnnnnnnnnnnnnnnnnnnnnnnnnnnnnnnnnnnnnnnnnnnnnnnnnnnnnnnnnnnnnnnnnnnnnnnnnnnnnnnnnnnnnnnnnnnnnnnnnnnnnnnnnnnnnnnnnnnnnnnnnnnnnnnnnnnnnnnnnnnnnnnnnnnnnnnnnnnnnnnnnnnnnnnnnnnnnnnnnnnnnnnnnnnnnnnnnnnnnnnnnnnnnnnnnnnnnnnnnnnnnnnnnnnnnnnnnnnnnnnnnnnnnnnnnnnnnnnnnnnnnnnnnnnnnnnnnnnnnnnnnnnnnnnnnnnnnnnnnnnnnnnnnnnnnnnnnnnnnnnnnnnnnnnnnnnnnnnnnnnnnnnnnnnnnnnnnnnnnnnnnnnnnnnnnnnnnnnnnnnnnnnnnnnnnnnnnnnnnnnnnnnnnnnnnnnnnnnnnnnnnnnnnnnnnnnnnnnnnnnnnnnnnnnnnnnnnnnnnnnnnnnnnnnnnnnnnnnnnnnnnnnnnnnnnnnnnnnnnnnnnnnnnnnnnnnnnnnnnnnnnnnnnnnnnnnnnnnnnnnnnnnnnnnnnnnnnnnnnnnnnnnnnnnnnnnnnnnnnnnnnnnnnnnnnnnnnnnnnnnnnnnnnnnnnnnnnnnnnnnnnnnnnnnnnnnnnnnnnnnnnnnnnnnnnnnnnnnnnnnnnnnnnnnnnnnnnnnnnnnnnnnnnnnnnnnnnnnnnnnnnnnnnnnnnnnnnnnnnnnnnnnnnnnnnnnnnnnnnnnnnnnnnnnnnnnnnnnnnnnnnnnnnnnnnnnnnnnnnnnnnnnnnnnnnnnnnnnnnnnnnnnnnnnnnnnnnnnnnnnnnnnnnnnnnnnnnnnnnnnnnnnnnnnnnnnnnnnnnnnnnnnnnnnnnnnnnnnnnnnnnnnnnnnnnnnnnnnnnnnnnnnnnnnnnnnnnnnnnnnnnnnnnnnnnnnnnnnnnnnnnnnnnnnnnnnnnnnnnnnnnnnnnnnnnnnnnnnnnnnnnnnnnnnnnnnnnnnnnnnnnnnnnnnnnnnnnnnnnnnnnnnnnnnnnnnnnnnnnnnnnnnnnnnnnnnnnnnnnnnnnnnnnnnnnnnnnnnnnnnnnnnnnnnnnnnnnnnnnnnnnnnnnnnnnnnnnnnnnnnnnnnnnnnnnnnnnnnnnnnnnnnnnnnnnnnnnnnnnnnnnnnnnnnnnnnnnnnnnnnnnnnnnnnnnnnnnnnnnnnnnnnnnnnnnnnnnnnnnnnnnnnnnnnnnnnnnnnnnnnnnnnnnnnnnnnnnnnnnnnnnnnnnnnnnnnnnnnnnnnnnnnnnnnnnnnnnnnnnnnnnnnnnnnnnnnnnnnnnnnnnnnnnnnnnnnnnnnnnnnnnnnnnnnnnnnnnnnnnnnnnnnnnnnnnnnnnnnnnnnnnnnnnnnnnnnnnnnnnnnnnnnnnnnnnnnnnnnnnnnnnnnnnnnnnnnnnnnnnnnnnnnnnnnnnnnnnnnnnnnnnnnnnnnnnnnnnnnnnnnnnnnnnnnnnnnnnnnnnnnnnnnnnnnnnnnnnnnnnnnnnnnnnnnnnnnnnnnnnnnnnnnnnnnnnnnnnnnnnnnnnnnnnnnnnnnnnnnnnnnnnnnnnnnnnnnnnnnnnnnnnnnnnnnnnnnnnnnnnnnnnnnnnnnnnnnnnnnnnnnnnnnnnnnnnnnnnnnnnnnnnnnnnnnnnnnnnnnnnnnnnnnnnnnnnnnnnnnnnnnnnnnnnnnnnnnnnnnnnnnnnnnnnnnnnnnnnnnnnnnnnnnnnnnnnnnnnnnnnnnnnnnnnnnnnnnnnnnnnnnnnnnnnnnnnnnnnnnnnnnnnnnnnnnnnnnnnnnnnnnnnnnnnnnnnnnnnnnnnnnnnnnnnnnnnnnnnnnnnnnnnnnnnnnnnnnnnnnnnnnnnnnnnnnnnnnnnnnnnnnnnnnnnnnnnnnnnnnnnnnnnnnnnnnnnnnnnnnnnnnnnnnnnnnnnnnnnnnnnnnnnnnnnnnnnnnnnnnnnnnnnnnnnnnnnnnnnnnnnnnnnnnnnnnnnnnnnnnnnnnnnnnnnnnnnnnnnnnnnnnnnnnnnnnnnnnnnnnnnnnnnnnnnnnnnnnnnnnnnnnnnnnnnnnnnnnnnnnnnnnnnnnnnnnnnnnnnnnnnnnnnnnnnnnnnnnnnnnnnnnnnnnnnnnnnnnnnnnnnnnnnnnnnnnnnnnnnnnnnnnnnnnnnnnnnnnnnnnnnnnnnnnnnnnnnnnnnnnnnnnnnnnnnnnnnnnnnnnnnnnnnnnnnnnnnnnnnnnnnnnnnnnnnnnnnnnnnnnnnnnnnnnnnnnnnnnnnnnnnnnnnnnnnnnnnnnnnnnnnnnnnnnnnnnnnnnnnnnnnnnnnnnnnnnnnnnnnnnnnnnnnnnnnnnnnnnnnnnnnnnnnnnnnnnnnnnnnnnnnnnnnnnnnnnnnnnnnnnnnnnnnnnnnnnnnnnnnnnnnnnnnnnnnnnnnnnnnnnnnnnnnnnnnnnnnnnnnnnnnnnnnnnnnnnnnnnnnnnnnnnnnnnnnnnnnnnnnnnnnnnnnnnnnnnnnnnnnnnnnnnnnnnnnnnnnnnnnnnnnnnnnnnnnnnnnnnnnnnnnnnnnnnnnnnnnnnnnnnnnnnnnnnnnnnnnnnnnnnnnnnnnnnnnnnnnnnnnnnnnnnnnnnnnnnnnnnnnnnnnnnnnnnnnnnnnnnnnnnnnnnnnnnnnnnnnnnnnnnnnnnnnnnnnnnnnnnnnnnnnnnnnnnnnnnnnnnnnnnnnnnnnnnnnnnnnnnnnnnnnnnnnnnnnnnnnnnnnnnnnnnnnnnnnnnnnnnnnnnnnnnnnnnnnnnnnnnnnnnnnnnnnnnnnnnnnnnnnnnnnnnnnnnnnnnnnnnnnnnnnnnnnnnnnnnnnnnnnnnnnnnnnnnnnnnnnnnnnnnnnnnnnnnnnnnnnnnnnnnnnnnnnnnnnnnnnnnnnnnnnnnnnnnnnnnnnnnnnnnnnnnnnnnnnnnnnnnnnnnnnnnnnnnnnnnnnnnnnnnnnnnnnnnnnnnnnnnnnnnnnnnnnnnnnnnnnnnnnnnnnnnnnnnnnnnnnnnnnnnnnnnnnnnnnnnnnnnnnnnnnnnnnnnnnnnnnnnnnnnnnnnnnnnnnnnnnnnnnnnnnnnnnnnnnnnnnnnnnnnnnnnnnnnnnnnnnnnnnnnnnnnnnnnnnnnnnnnnnnnnnnnnnnnnnnnnnnnnnnnnnnnnnnnnnnnnnnnnnnnnnnnnnnnnnnnnnnnnnnnnnnnnnnnnnnnnnnnnnnnnnnnnnnnnnnnnnnnnnnnnnnnnnnnnnnnnnnnnnnnnnnnnnnnnnnnnnnnnnnnnnnnnnnnnnnnnnnnnnnnnnnnnnnnnnnnnnnnnnnnnnnnnnnnnnnnnnnnnnnnnnnnnnnnnnnnnnnnnnnnnnnnnnnnnnnnnnnnnnnnnnnnnnnnnnnnnnnnnnnnnnnnnnnnnnnnnnnnnnnnnnnnnnnnnnnnnnnnnnnnnnnnnnnnnnnnnnnnnnnnnnnnnnnnnnnnnnnnnnnnnnnnnnnnnnnnnnnnnnnnnnnnnnnnnnnnnnnnnnnnnnnnnnnnnnnnnnnnnnnnnnnnnnnnnnnnnnnnnnnnnnnnnnnnnnnnnnnnnnnnnnnnnnnnnnnnnnnnnnnnnnnnnnnnnnnnnnnnnnnnnnnnnnnnnnnnnnnnnnnnnnnnnnnnnnnnnnnnnnnnnnnnnnnnnnnnnnnnnnnnnnnnnnnnnnnnnnnnnnnnnnnnnnnnnnnnnnnnnnnnnnnnnnnnnnnnnnnnnnnnnnnnnnnnnnnnnnnnnnnnnnnnnnnnnnnnnnnnnnnnnnnnnnnnnnnnnnnnnnnnnnnnnnnnnnnnnnnnnnnnnnnnnnnnnnnnnnnnnnnnnnnnnnnnnnnnnnnnnnnnnnnnnnnnnnnnnnnnnnnnnnnnnnnnnnnnnnnnnnnnnnnnnnnnnnnnnnnnnnnnnnnnnnnnnnnnnnnnnnnnnnnnnnnnnnnnnnnnnnnnnnnnnnnnnnnnnnnnnnnnnnnnnnnnnnnnnnnnnnnnnnnnnnnnnnnnnnnnnnnnnnnnnnnnnnnnnnnnnnnnnnnnnnnnnnnnnnnnnnnnnnnnnnnnnnnnnnnnnnnnnnnnnnnnnnnnnnnnnnnnnnnnnnnnnnnnnnnnnnnnnnnnnnnnnnnnnnnnnnnnnnnnnnnnnnnnnnnnnnnnnnnnnnnnnnnnnnnnnnnnnnnnnnnnnnnnnnnnnnnnnnnnnnnnnnnnnnnnnnnnnnnnnnnnnnnnnnnnnnnnnnnnnnnnnnnnnnnnnnnnnnnnnnnnnnnnnnnnnnnnnnnnnnnnnnnnnnnnnnnnnnnnnnnnnnnnnnnnnnnnnnnnnnnnnnnnnnnnnnnnnnnnnnnnnnnnnnnnnnnnnnnnnnnnnnnnnnnnnnnnnnnnnnnnnnnnnnnnnnnnnnnnnnnnnnnnnnnnnnnnnnnnnnnnnnnnnnnnnnnnnnnnnnnnnnnnnnnnnnnnnnnnnnnnnnnnnnnnnnnnnnnnnnnnnnnnnnnnnnnnnnnnnnnnnnnnnnnnnnnnnnnnnnnnnnnnnnnnnnnnnnnnnnnnnnnnnnnnnnnnnnnnnnnnnnnnnnnnnnnnnnnnnnnnnnnnnnnnnnnnnnnnnnnnnnnnnnnnnnnnnnnnnnnnnnnnnnnnnnnnnnnnnnnnnnnnnnnnnnnnnnnnnnnnnnnnnnnnnnnnnnnnnnnnnnnnnnnnnnnnnnnnnnnnnnnnnnnnnnnnnnnnnnnnnnnnnnnnnnnnnnnnnnnnnnnnnnnnnnnnnnnnnnnnnnnnnnnnnnnnnnnnnnnnnnnnnnnnnnnnnnnnnnnnnnnnnnnnnnnnnnnnnnnnnnnnnnnnnnnnnnnnnnnnnnnnnnnnnnnnnnnnnnnnnnnnnnnnnnnnnnnnnnnnnnnnnnnnnnnnnnnnnnnnnnnnnnnnnnnnnnnnnnnnnnnnnnnnnnnnnnnnnnnnnnnnnnnnnnnnnnnnnnnnnnnnnnnnnnnnnnnnnnnnnnnnnnnnnnnnnnnnnnnnnnnnnnnnnnnnnnnnnnnnnnnnnnnnnnnnnnnnnnnnnnnnnnnnnnnnnnnnnnnnnnnnnnnnnnnnnnnnnnnnnnnnnnnnnnnnnnnnnnnnnnnnnnnnnnnnnnnnnnnnnnnnnnnnnnnnnnnnnnnnnnnnnnnnnnnnnnnnnnnnnnnnnnnnnnnnnnnnnnnnnnnnnnnnnnnnnnnnnnnnnnnnnnnnnnnnnnnnnnnnnnnnnnnnnnnnnnnnnnnnnnnnnnnnnnnnnnnnnnnnnnnnnnnnnnnnnnnnnnnnnnnnnnnnnnnnnnnnnnnnnnnnnnnnnnnnnnnnnnnnnnnnnnnnnnnnnnnnnnnnnnnnnnnnnnnnnnnnnnnnnnnnnnnnnnnnnnnnnnnnnnnnnnnnnnnnnnnnnnnnnnnnnnnnnnnnnnnnnnnnnnnnnnnnnnnnnnnnnnnnnnnnnnnnnnnnnnnnnnnnnnnnnnnnnnnnnnnnnnnnnnnnnnnnnnnnnnnnnnnnnnnnnnnnnnnnnnnnnnnnnnnnnnnnnnnnnnnnnnnnnnnnnnnnnnnnnnnnnnnnnnnnnnnnnnnnnnnnnnnnnnnnnnnnnnnnnnnnnnnnnnnnnnnnnnnnnnnnnnnnnnnnnnnnnnnnnnnnnnnnnnnnnnnnnnnnnnnnnnnnnnnnnnnnnnnnnnnnnnnnnnnnnnnnnnnnnnnnnnnnnnnnnnnnnnnnnnnnnnnnnnnnnnnnnnnnnnnnnnnnnnnnnnnnnnnnnnnnnnnnnnnnnnnnnnnnnnnnnnnnnnnnnnnnnnnnnnnnnnnnnnnnnnnnnnnnnnnnnnnnnnnnnnnnnnnnnnnnnnnnnnnnnnnnnnnnnnnnnnnnnnnnnnnnnnnnnnnnnnnnnnnnnnnnnnnnnnnnnnnnnnnnnnnnnnnnnnnnnnnnnnnnnnnnnnnnnnnnnnnnnnnnnnnnnnnnnnnnnnnnnnnnnnnnnnnnnnnnnnnnnnnnnnnnnnnnnnnnnnnnnnnnnnnnnnnnnnnnnnnnnnnnnnnnnnnnnnnnnnnnnnnnnnnnnnnnnnnnnnnnnnnnnnnnnnnnnnnnnnnnnnnnnnnnnnnnnnnnnnnnnnnnnnnnnnnnnnnnnnnnnnnnnnnnnnnnnnnnnnnnnnnnnnnnnnnnnnnnnnnnnnnnnnnnnnnnnnnnnnnnnnnnnnnnnnnnnnnnnnnnnnnnnnnnnnnnnnnnnnnnnnnnnnnnnnnnnnnnnnnnnnnnnnnnnnnnnnnnnnnnnnnnnnnnnnnnnnnnnnnnnnnnnnnnnnnnnnnnnnnnnnnnnnnnnnnnnnnnnnnnnnnnnnnnnnnnnnnnnnnnnnnnnnnnnnnnnnnnnnnnnnnnnnnnnnnnnnnnnnnnnnnnnnnnnnnnnnnnnnnnnnnnnnnnnnnnnnnnnnnnnnnnnnnnnnnnnnnnnnnnnnnnnnnnnnnnnnnnnnnnnnnnnnnnnnnnnnnnnnnnnnnnnnnnnnnnnnnnnnnnnnnnnnnnnnnnnnnnnnnnnnnnnnnnnnnnnnnnnnnnnnnnnnnnnnnnnnnnnnnnnnnnnnnnnnnnnnnnnnnnnnnnnnnnnnnnnnnnnnnnnnnnnnnnnnnnnnnnnnnnnnnnnnnnnnnnnnnnnnnnnnnnnnnnnnnnnnnnnnnnnnnnnnnnnnnnnnnnnnnnnnnnnnnnnnnnnnnnnnnnnnnnnnnnnnnnnnnnnnnnnnnnnnnnnnnnnnnnnnnnnnnnnnnnnnnnnnnnnnnnnnnnnnnnnnnnnnnnnnnnnnnnnnnnnnnnnnnnnnnnnnnnnnnnnnnnnnnnnnnnnnnnnnnnnnnnnnnnnnnnnnnnnnnnnnnnnnnnnnnnnnnnnnnnnnnnnnnnnnnnnnnnnnnnnnnnnnnnnnnnnnnnnnnnnnnnnnnnnnnnnnnnnnnnnnnnnnnnnnnnnnnnnnnnnnnnnnnnnnnnnnnnnnnnnnnnnnnnnnnnnnnnnnnnnnnnnnnnnnnnnnnnnnnnnnnnnnnnnnnnnnnnnnnnnnnnnnnnnnnnnnnnnnnnnnnnnnnnnnnnnnnnnnnnnnnnnnnnnnnnnnnnnnnnnnnnnnnnnnnnnnnnnnnnnnnnnnnnnnnnnnnnnnnnnnnnnnnnnnnnnnnnnnnnnnnnnnnnnnnnnnnnnnnnnnnnnnnnnnnnnnnnnnnnnnnnnnnnnnnnnnnnnnnnnnnnnnnnnnnnnnnnnnnnnnnnnnnnnnnnnnnnnnnnnnnnnnnnnnnnnnnnnnnnnnnnnnnnnnnnnnnnnnnnnnnnnnnnnnnnnnnnnnnnnnnnnnnnnnnnnnnnnnnnnnnnnnnnnnnnnnnnnnnnnnnnnnnnnnnnnnnnnnnnnnnnnnnnnnnnnnnnnnnnnnnnnnnnnnnnnnnnnnnnnnnnnnnnnnnnnnnnnnnnnnnnnnnnnnnnnnnnnnnnnnnnnnnnnnnnnnnnnnnnnnnnnnnnnnnnnnnnnnnnnnnnnnnnnnnnnnnnnnnnnnnnnnnnnnnnnnnnnnnnnnnnnnnnnnnnnnnnnnnnnnnnnnnnnnnnnnnnnnnnnnnnnnnnnnnnnnnnnnnnnnnnnnnnnnnnnnnnnnnnnnnnnnnnnnnnnnnnnnnnnnnnnnnnnnnnnnnnnnnnnnnnnnnnnnnnnnnnnnnnnnnnnnnnnnnnnnnnnnnnnnnnnnnnnnnnnnnnnnnnnnnnnnnnnnnnnnnnnnnnnnnnnnnnnnnnnnnnnnnnnnnnnnnnnnnnnnnnnnnnnnnnnnnnnnnnnnnnnnnnnnnnnnnnnnnnnnnnnnnnnnnnnnnnnnnnnnnnnnnnnnnnnnnnnnnnnnnnnnnnnnnnnnnnnnnnnnnnnnnnnnnnnnnnnnnnnnnnnnnnnnnnnnnnnnnnnnnnnnnnnnnnnnnnnnnnnnnnnnnnnnnnnnnnnnnnnnnnnnnnnnnnnnnnnnnnnnnnnnnnnnnnnnnnnnnnnnnnnnnnnnnnnnnnnnnnnnnnnnnnnnnnnnnnnnnnnnnnnnnnnnnnnnnnnnnnnnnnnnnnnnnnnnnnnnnnnnnnnnnnnnnnnnnnnnnnnnnnnnnnnnnnnnnnnnnnnnnnnnnnnnnnnnnnnnnnnnnnnnnnnnnnnnnnnnnnnnnnnnnnnnnnnnnnnnnnnnnnnnnnnnnnnnnnnnnnnnnnnnnnnnnnnnnnnnnnnnnnnnnnnnnnnnnnnnnnnnnnnnnnnnnnnnnnnnnnnnnnnnnnnnnnnnnnnnnnnnnnnnnnnnnnnnnnnnnnnnnnnnnnnnnnnnnnnnnnnnnnnnnnnnnnnnnnnnnnnnnnnnnnnnnnnnnnnnnnnnnnnnnnnnnnnnnnnnnnnnnnnnnnnnnnnnnnnnnnnnnnnnnnnnnnnnnnnnnnnnnnnnnnnnnnnnnnnnnnnnnnnnnnnnnnnnnnnnnnnnnnnnnnnnnnnnnnnnnnnnnnnnnnnnnnnnnnnnnnnnnnnnnnnnnnnnnnnnnnnnnnnnnnnnnnnnnnnnnnnnnnnnnnnnnnnnnnnnnnnnnnnnnnnnnnnnnnnnnnnnnnnnnnnnnnnnnnnnnnnnnnnnnnnnnnnnnnnnnnnnnnnnnnnnnnnnnnnnnnnnnnnnnnnnnnnnnnnnnnnnnnnnnnnnnnnnnnnnnnnnnnnnnnnnnnnnnnnnnnnnnnnnnnnnnnnnnnnnnnnnnnnnnnnnnnnnnnnnnnnnnnnnnnnnnnnnnnnnnnnnnnnnnnnnnnnnnnnnnnnnnnnnnnnnnnnnnnnnnnnnnnnnnnnnnnnnnnnnnnnnnnnnnnnnnnnnnnnnnnnnnnnnnnnnnnnnnnnnnnnnnnnnnnnnnnnnnnnnnnnnnnnnnnnnnnnnnnnnnnnnnnnnnnnnnnnnnnnnnnnnnnnnnnnnnnnnnnnnnnnnnnnnnnnnnnnnnnnnnnnnnnnnnnnnnnnnnnnnnnnnnnnnnnnnnnnnnnnnnnnnnnnnnnnnnnnnnnnnnnnnnnnnnnnnnnnnnnnnnnnnnnnnnnnnnnnnnnnnnnnnnnnnnnnnnnnnnnnnnnnnnnnnnnnnnnnnnnnnnnnnnnnnnnnnnnnnnnnnnnnnnnnnnnnnnnnnnnnnnnnnnnnnnnnnnnnnnnnnnnnnnnnnnnnnnnnnnnnnnnnnnnnnnnnnnnnnnnnnnnnnnnnnnnnnnnnnnnnnnnnnnnnnnnnnnnnnnnnnnnnnnnnnnnnnnnnnnnnnnnnnnnnnnnnnnnnnnnnnnnnnnnnnnnnnnnnnnnnnnnnnnnnnnnnnnnnnnnnnnnnnnnnnnnnnnnnnnnnnnnnnnnnnnnnnnnnnnnnnnnnnnnnnnnnnnnnnnnnnnnnnnnnnnnnnnnnnnnnnnnnnnnnnnnnnnnnnnnnnnnnnnnnnnnnnnnnnnnnnnnnnnnnnnnnnnnnnnnnnnnnnnnnnnnnnnnnnnnnnnnnnnnnnnnnnnnnnnnnnnnnnnnnnnnnnnnnnnnnnnnnnnnnnnnnnnnnnnnnnnnnnnnnnnnnnnnnnnnnnnnnnnnnnnnnnnnnnnnnnnnnnnnnnnnnnnnnnnnnnnnnnnnnnnnnnnnnnnnnnnnnnnnnnnnnnnnnnnnnnnnnnnnnnnnnnnnnnnnnnnnnnnnnnnnnnnnnnnnnnnnnnnnnnnnnnnnnnnnnnnnnnnnnnnnnnnnnnnnnnnnnnnnnnnnnnnnnnnnnnnnnnnnnnnnnnnnnnnnnnnnnnnnnnnnnnnnnnnnnnnnnnnnnnnnnnnnnnnnnnnnnnnnnnnnnnnnnnnnnnnnnnnnnnnnnnnnnnnnnnnnnnnnnnnnnnnnnnnnnnnnnnnnnnnnnnnnnnnnnnnnnnnnnnnnnnnnnnnnnnnnnnnnnnnnnnnnnnnnnnnnnnnnnnnnnnnnnnnnnnnnnnnnnnnnnnnnnnnnnnnnnnnnnnnnnnnnnnnnnnnnnnnnnnnnnnnnnnnnnnnnnnnnnnnnnnnnnnnnnnnnnnnnnnnnnnnnnnnnnnnnnnnnnnnnnnnnnnnnnnnnnnnnnnnnnnnnnnnnnnnnnnnnnnnnnnnnnnnnnnnnnnnnnnnnnnnnnnnnnnnnnnnnnnnnnnnnnnnnnnnnnnnnnnnnnnnnnnnnnnnnnnnnnnnnnnnnnnnnnnnnnnnnnnnnnnnnnnnnnnnnnnnnnnnnnnnnnnnnnnnnnnnnnnnnnnnnnnnnnnnnnnnnnnnnnnnnnnnnnnnnnnnnnnnnnnnnnnnnnnnnnnnnnnnnnnnnnnnnnnnnnnnnnnnnnnnnnnnnnnnnnnnnnnnnnnnnnnnnnnnnnnnnnnnnnnnnnnnnnnnnnnnnnnnnnnnnnnnnnnnnnnnnnnnnnnnnnnnnnnnnnnnnnnnnnnnnnnnnnnnnnnnnnnnnnnnnnnnnnnnnnnnnnnnnnnnnnnnnnnnnnnnnnnnnnnnnnnnnnnnnnnnnnnnnnnnnnnnnnnnnnnnnnnnnnnnnnnnnnnnnnnnnnnnnnnnnnnnnnnnnnnnnnnnnnnnnnnnnnnnnnnnnnnnnnnnnnnnnnnnnnnnnnnnnnnnnnnnnnnnnnnnnnnnnnnnnnnnnnnnnnnnnnnnnnnnnnnnnnnnnnnnnnnnnnnnnnnnnnnnnnnnnnnnnnnnnnnnnnnnnnnnnnnnnnnnnnnnnnnnnnnnnnnnnnnnnnnnnnnnnnnnnnnnnnnnnnnnnnnnnnnnnnnnnnnnnnnnnnnnnnnnnnnnnnnnnnnnnnnnnnnnnnnnnnnnnnnnnnnnnnnnnnnnnnnnnnnnnnnnnnnnnnnnnnnnnnnnnnnnnnnnnnnnnnnnnnnnnnnnnnnnnnnnnnnnnnnnnnnnnnnnnnnnnnnnnnnnnnnnnnnnnnnnnnnnnnnnnnnnnnnnnnnnnnnnnnnnnnnnnnnnnnnnnnnnnnnnnnnnnnnnnnnnnnnnnnnnnnnnnnnnnnnnnnnnnnnnnnnnnnnnnnnnnnnnnnnnnnnnnnnnnnnnnnnnnnnnnnnnnnnnnnnnnnnnnnnnnnnnnnnnnnnnnnnnnnnnnnnnnnnnnnnnnnnnnnnnnnnnnnnnnnnnnnnnnnnnnnnnnnnnnnnnnnnnnnnnnnnnnnnnnnnnnnnnnnnnnnnnnnnnnnnnnnnnnnnnnnnnnnnnnnnnnnnnnnnnnnnnnnnnnnnnnnnnnnnnnnnnnnnnnnnnnnnnnnnnnnnnnnnnnnnnnnnnnnnnnnnnnnnnnnnnnnnnnnnnnnnnnnnnnnnnnnnnnnnnnnnnnnnnnnnnnnnnnnnnnnnnnnnnnnnnnnnnnnnnnnnnnnnnnnnnnnnnnnnnnnnnnnnnnnnnnnnnnnnnnnnnnnnnnnnnnnnnnnnnnnnnnnnnnnnnnnnnnnnnnnnnnnnnnnnnnnnnnnnnnnnnnnnnnnnnnnnnnnnnnnnnnnnnnnnnnnnnnnnnnnnnnnnnnnnnnnnnnnnnnnnnnnnnnnnnnnnnnnnnnnnnnnnnnnnnnnnnnnnnnnnnnnnnnnnnnnnnnnnnnnnnnnnnnnnnnnnnnnnnnnnnnnnnnnnnnnnnnnnnnnnnnnnnnnnnnnnnnnnnnnnnnnnnnnnnnnnnnnnnnnnnnnnnnnnnnnnnnnnnnnnnnnnnnnnnnnnnnnnnnnnnnnnnnnnnnnnnnnnnnnnnnnnnnnnnnnnnnnnnnnnnnnnnnnnnnnnnnnnnnnnnnnnnnnnnnnnnnnnnnnnnnnnnnnnnnnnnnnnnnnnnnnnnnnnnnnnnnnnnnnnnnnnnnnnnnnnnnnnnnnnnnnnnnnnnnnnnnnnnnnnnnnnnnnnnnnnnnnnnnnnnnnnnnnnnnnnnnnnnnnnnnnnnnnnnnnnnnnnnnnnnnnnnnnnnnnnnnnnnnnnnnnnnnnnnnnnnnnnnnnnnnnnnnnnnnnnnnnnnnnnnnnnnnnnnnnnnnnnnnnnnnnnnnnnnnnnnnnnnnnnnnnnnnnnnnnnnnnnnnnnnnnnnnnnnnnnnnnnnnnnnnnnnnnnnnnnnnnnnnnnnnnnnnnnnnnnnnnnnnnnnnnnnnnnnnnnnnnnnnnnnnnnnnnnnnnnnnnnnnnnnnnnnnnnnnnnnnnnnnnnnnnnnnnnnnnnnnnnnnnnnnnnnnnnnnnnnnnnnnnnnnnnnnnnnnnnnnnnnnnnnnnnnnnnnnnnnnnnnnnnnnnnnnnnnnnnnnnnnnnnnnnnnnnnnnnnnnnnnnnnnnnnnnnnnnnnnnnnnnnnnnnnnnnnnnnnnnnnnnnnnnnnnnnnnnnnnnnnnnnnnnnnnnnnnnnnnnnnnnnnnnnnnnnnnnnnnnnnnnnnnnnnnnnnnnnnnnnnnnnnnnnnnnnnnnnnnnnnnnnnnnnnnnnnnnnnnnnnnnnnnnnnnnnnnnnnnnnnnnnnnnnnnnnnnnnnnnnnnnnnnnnnnnnnnnnnnnnnnnnnnnnnnnnnnnnnnnnnnnnnnnnnnnnnnnnnnnnnnnnnnnnnnnnnnnnnnnnnnnnnnnnnnnnnnnnnnnnnnnnnnnnnnnnnnnnnnnnnnnnnnnnnnnnnnnnnnnnnnnnnnnnnnnnnnnnnnnnnnnnnnnnnnnnnnnnnnnnnnnnnnnnnnnnnnnnnnnnnnnnnnnnnnnnnnnnnnnnnnnnnnnnnnnnnnnnnnnnnnnnnnnnnnnnnnnnnnnnnnnnnnnnnnnnnnnnnnnnnnnnnnnnnnnnnnnnnnnnnnnnnnnnnnnnnnnnnnnnnnnnnnnnnnnnnnnnnnnnnnnnnnnnnnnnnnnnnnnnnnnnnnnnnnnnnnnnnnnnnnnnnnnnnnnnnnnnnnnnnnnnnnnnnnnnnnnnnnnnnnnnnnnnnnnnnnnnnnnnnnnnnnnnnnnnnnnnnnnnnnnnnnnnnnnnnnnnnnnnnnnnnnnnnnnnnnnnnnnnnnnnnnnnnnnnnnnnnnnnnnnnnnnnnnnnnnnnnnnnnnnnnnnnnnnnnnnnnnnnnnnnnnnnnnnnnnnnnnnnnnnnnnnnnnnnnnnnnnnnnnnnnnnnnnnnnnnnnnnnnnnnnnnnnnnnnnnnnnnnnnnnnnnnnnnnnnnnnnnnnnnnnnnnnnnnnnnnnnnnnnnnnnnnnnnnnnnnnnnnnnnnnnnnnnnnnnnnnnnnnnnnnnnnnnnnnnnnnnnnnnnnnnnnnnnnnnnnnnnnnnnnnnnnnnnnnnnnnnnnnnnnnnnnnnnnnnnnnnnnnnnnnnnnnnnnnnnnnnnnnnnnnnnnnnnnnnnnnnnnnnnnnnnnnnnnnnnnnnnnnnnnnnnnnnnnnnnnnnnnnnnnnnnnnnnnnnnnnnnnnnnnnnnnnnnnnnnnnnnnnnnnnnnnnnnnnnnnnnnnnnnnnnnnnnnnnnnnnnnnnnnnnnnnnnnnnnnnnnnnnnnnnnnnnnnnnnnnnnnnnnnnnnnnnnnnnnnnnnnnnnnnnnnnnnnnnnnnnnnnnnnnnnnnnnnnnnnnnnnnnnnnnnnnnnnnnnnnnnnnnnnnnnnnnnnnnnnnnnnnnnnnnnnnnnnnnnnnnnnnnnnnnnnnnnnnnnnnnnnnnnnnnnnnnnnnnnnnnnnnnnnnnnnnnnnnnnnnnnnnnnnnnnnnnnnnnnnnnnnnnnnnnnnnnnnnnnnnnnnnnnnnnnnnnnnnnnnnnnnnnnnnnnnnnnnnnnnnnnnnnnnnnnnnnnnnnnnnnnnnnnnnnnnnnnnnnnnnnnnnnnnnnnnnnnnnnnnnnnnnnnnnnnnnnnnnnnnnnnnnnnnnnnnnnnnnnnnnnnnnnnnnnnnnnnnnnnnnnnnnnnnnnnnnnnnnnnnnnnnnnnnnnnnnnnnnnnnnnnnnnnnnnnnnnnnnnnnnnnnnnnnnnnnnnnnnnnnnnnnnnnnnnnnnnnnnnnnnnnnnnnnnnnnnnnnnnnnnnnnnnnnnnnnnnnnnnnnnnnnnnnnnnnnnnnnnnnnnnnnnnnnnnnnnnnnnnnnnnnnnnnnnnnnnnnnnnnnnnnnnnnnnnnnnnnnnnnnnnnnnnnnnnnnnnnnnnnnnnnnnnnnnnnnnnnnnnnnnnnnnnnnnnnnnnnnnnnnnnnnnnnnnnnnnnnnnnnnnnnnnnnnnnnnnnnnnnnnnnnnnnnnnnnnnnnnnnnnnnnnnnnnnnnnnnnnnnnnnnnnnnnnnnnnnnnnnnnnnnnnnnnnnnnnnnnnnnnnnnnnnnnnnnnnnnnnnnnnnnnnnnnnnnnnnnnnnnnnnnnnnnnnnnnnnnnnnnnnnnnnnnnnnnnnnnnnnnnnnnnnnnnnnnnnnnnnnnnnnnnnnnnnnnnnnnnnnnnnnnnnnnnnnnnnnnnnnnnnnnnnnnnnnnnnnnnnnnnnnnnnnnnnnnnnnnnnnnnnnnnnnnnnnnnnnnnnnnnnnnnnnnnnnnnnnnnnnnnnnnnnnnnnnnnnnnnnnnnnnnnnnnnnnnnnnnnnnnnnnnnnnnnnnnnnnnnnnnnnnnnnnnnnnnnnnnnnnnnnnnnnnnnnnnnnnnnnnnnnnnnnnnnnnnnnnnnnnnnnnnnnnnnnnnnnnnnnnnnnnnnnnnnnnnnnnnnnnnnnnnnnnnnnnnnnnnnnnnnnnnnnnnnnnnnnnnnnnnnnnnnnnnnnnnnnnnnnnnnnnnnnnnnnnnnnnnnnnnnnnnnnnnnnnnnnnnnnnnnnnnnnnnnnnnnnnnnnnnnnnnnnnnnnnnnnnnnnnnnnnnnnnnnnnnnnnnnnnnnnnnnnnnnnnnnnnnnnnnnnnnnnnnnnnnnnnnnnnnnnnnnnnnnnnnnnnnnnnnnnnnnnnnnnnnnnnnnnnnnnnnnnnnnnnnnnnnnnnnnnnnnnnnnnnnnnnnnnnnnnnnnnnnnnnnnnnnnnnnnnnnnnnnnnnnnnnnnnnnnnnnnnnnnnnnnnnnnnnnnnnnnnnnnnnnnnnnnnnnnnnnnnnnnnnnnnnnnnnnnnnnnnnnnnnnnnnnnnnnnnnnnnnnnnnnnnnnnnnnnnnnnnnnnnnnnnnnnnnnnnnnnnnnnnnnnnnnnnnnnnnnnnnnnnnnnnnnnnnnnnnnnnnnnnnnnnnnnnnnnnnnnnnnnnnnnnnnnnnnnnnnnnnnnnnnnnnnnnnnnnnnnnnnnnnnnnnnnnnnnnnnnnnnnnnnnnnnnnnnnnnnnnnnnnnnnnnnnnnnnnnnnnnnnnnnnnnnnnnnnnnnnnnnnnnnnnnnnnnnnnnnnnnnnnnnnnnnnnnnnnnnnnnnnnnnnnnnnnnnnnnnnnnnnnnnnnnnnnnnnnnnnnnnnnnnnnnnnnnnnnnnnnnnnnnnnnnnnnnnnnnnnnnnnnnnnnnnnnnnnnnnnnnnnnnnnnnnnnnnnnnnnnnnnnnnnnnnnnnnnnnnnnnnnnnnnnnnnnnnnnnnnnnnnnnnnnnnnnnnnnnnnnnnnnnnnnnnnnnnnnnnnnnnnnnnnnnnnnnnnnnnnnnnnnnnnnnnnnnnnnnnnnnnnnnnnnnnnnnnnnnnnnnnnnnnnnnnnnnnnnnnnnnnnnnnnnnnnnnnnnnnnnnnnnnnnnnnnnnnnnnnnnnnnnnnnnnnnnnnnnnnnnnnnnnnnnnnnnnnnnnnnnnnnnnnnnnnnnnnnnnnnnnnnnnnnnnnnnnnnnnnnnnnnnnnnnnnnnnnnnnnnnnnnnnnnnnnnnnnnnnnnnnnnnnnnnnnnnnnnnnnnnnnnnnnnnnnnnnnnnnnnnnnnnnnnnnnnnnnnnnnnnnnnnnnnnnnnnnnnnnnnnnnnnnnnnnnnnnnnnnnnnnnnnnnnnnnnnnnnnnnnnnnnnnnnnnnnnnnnnnnnnnnnnnnnnnnnnnnnnnnnnnnnnnnnnnnnnnnnnnnnnnnnnnnnnnnnnnnnnnnnnnnnnnnnnnnnnnnnnnnnnnnnnnnnnnnnnnnnnnnnnnnnnnnnnnnnnnnnnnnnnnnnnnnnnnnnnnnnnnnnnnnnnnnnnnnnnnnnnnnnnnnnnnnnnnnnnnnnnnnnnnnnnnnnnnnnnnnnnnnnnnnnnnnnnnnnnnnnnnnnnnnnnnnnnnnnnnnnnnnnnnnnnnnnnnnnnnnnnnnnnnnnnnnnnnnnnnnnnnnnnnnnnnnnnnnnnnnnnnnnnnnnnnnnnnnnnnnnnnnnnnnnnnnnnnnnnnnnnnnnnnnnnnnnnnnnnnnnnnnnnnnnnnnnnnnnnnnnnnnnnnnnnnnnnnnnnnnnnnnnnnnnnnnnnnnnnnnnnnnnnnnnnnnnnnnnnnnnnnnnnnnnnnnnnnnnnnnnnnnnnnnnnnnnnnnnnnnnnnnnnnnnnnnnnnnnnnnnnnnnnnnnnnnnnnnnnnnnnnnnnnnnnnnnnnnnnnnnnnnnnnnnnnnnnnnnnnnnnnnnnnnnnnnnnnnnnnnnnnnnnnnnnnnnnnnnnnnnnnnnnnnnnnnnnnnnnnnnnnnnnnnnnnnnnnnnnnnnnnnnnnnnnnnnnnnnnnnnnnnnnnnnnnnnnnnnnnnnnnnnnnnnnnnnnnnnnnnnnnnnnnnnnnnnnnnnnnnnnnnnnnnnnnnnnnnnnnnnnnnnnnnnnnnnnnnnnnnnnnnnnnnnnnnnnnnnnnnnnnnnnnnnnnnnnnnnnnnnnnnnnnnnnnnnnnnnnnnnnnnnnnnnnnnnnnnnnnnnnnnnnnnnnnnnnnnnnnnnnnnnnnnnnnnnnnnnnnnnnnnnnnnnnnnnnnnnnnnnnnnnnnnnnnnnnnnnnnnnnnnnnnnnnnnnnnnnnnnnnnnnnnnnnnnnnnnnnnnnnnnnnnnnnnnnnnnnnnnnnnnnnnnnnnnnnnnnnnnnnnnnnnnnnnnnnnnnnnnnnnnnnnnnnnnnnnnnnnnnnnnnnnnnnnnnnnnnnnnnnnnnnnnnnnnnnnnnnnnnnnnnnnnnnnnnnnnnnnnnnnnnnnnnnnnnnnnnnnnnnnnnnnnnnnnnnnnnnnnnnnnnnnnnnnnnnnnnnnnnnnnnnnnnnnnnnnnnnnnnnnnnnnnnnnnnnnnnnnnnnnnnnnnnnnnnnnnnnnnnnnnnnnnnnnnnnnnnnnnnnnnnnnnnnnnnnnnnnnnnnnnnnnnnnnnnnnnnnnnnnnnnnnnnnnnnnnnnnnnnnnnnnnnnnnnnnnnnnnnnnnnnnnnnnnnnnnnnnnnnnnnnnnnnnnnnnnnnnnnnnnnnnnnnnnnnnnnnnnnnnnnnnnnnnnnnnnnnnnnnnnnnnnnnnnnnnnnnnnnnnnnnnnnnnnnnnnnnnnnnnnnnnnnnnnnnnnnnnnnnnnnnnnnnnnnnnnnnnnnnnnnnnnnnnnnnnnnnnnnnnnnnnnnnnnnnnnnnnnnnnnnnnnnnnnnnnnnnnnnnnnnnnnnnnnnnnnnnnnnnnnnnnnnnnnnnnnnnnnnnnnnnnnnnnnnnnnnnnnnnnnnnnnnnnnnnnnnnnnnnnnnnnnnnnnnnnnnnnnnnnnnnnnnnnnnnnnnnnnnnnnnnnnnnnnnnnnnnnnnnnnnnnnnnnnnnnnnnnnnnnnnnnnnnnnnnnnnnnnnnnnnnnnnnnnnnnnnnnnnnnnnnnnnnnnnnnnnnnnnnnnnnnnnnnnnnnnnnnnnnnnnnnnnnnnnnnnnnnnnnnnnnnnnnnnnnnnnnnnnnnnnnnnnnnnnnnnnnnnnnnnnnnnnnnnnnnnnnnnnnnnnnnnnnnnnnnnnnnnnnnnnnnnnnnnnnnnnnnnnnnnnnnnnnnnnnnnnnnnnnnnnnnnnnnnnnnnnnnnnnnnnnnnnnnnnnnnnnnnnnnnnnnnnnnnnnnnnnnnnnnnnnnnnnnnnnnnnnnnnnnnnnnnnnnnnnnnnnnnnnnnnnnnnnnnnnnnnnnnnnnnnnnnnnnnnnnnnnnnnnnnnnnnnnnnnnnnnnnnnnnnnnnnnnnnnnnnnnnnnnnnnnnnnnnnnnnnnnnnnnnnnnnnnnnnnnnnnnnnnnnnnnnnnnnnnnnnnnnnnnnnnnnnnnnnnnnnnnnnnnnnnnnnnnnnnnnnnnnnnnnnnnnnnnnnnnnnnnnnnnnnnnnnnnnnnnnnnnnnnnnnnnnnnnnnnnnnnnnnnnnnnnnnnnnnnnnnnnnnnnnnnnnnnnnnnnnnnnnnnnnnnnnnnnnnnnnnnnnnnnnnnnnnnnnnnnnnnnnnnnnnnnnnnnnnnnnnnnnnnnnnnnnnnnnnnnnnnnnnnnnnnnnnnnnnnnnnnnnnnnnnnnnnnnnnnnnnnnnnnnnnnnnnnnnnnnnnnnnnnnnnnnnnnnnnnnnnnnnnnnnnnnnnnnnnnnnnnnnnnnnnnnnnnnnnnnnnnnnnnnnnnnnnnnnnnnnnnnnnnnnnnnnnnnnnnnnnnnnnnnnnnnnnnnnnnnnnnnnnnnnnnnnnnnnnnnnnnnnnnnnnnnnnnnnnnnnnnnnnnnnnnnnnnnnnnnnnnnnnnnnnnnnnnnnnnnnnnnnnnnnnnnnnnnnnnnnnnnnnnnnnnnnnnnnnnnnnnnnnnnnnnnnnnnnnnnnnnnnnnnnnnnnnnnnnnnnnnnnnnnnnnnnnnnnnnnnnnnnnnnnnnnnnnnnnnnnnnnnnnnnnnnnnnnnnnnnnnnnnnnnnnnnnnnnnnnnnnnnnnnnnnnnnnnnnnnnnnnnnnnnnnnnnnnnnnnnnnnnnnnnnnnnnnnnnnnnnnnnnnnnnnnnnnnnnnnnnnnnnnnnnnnnnnnnnnnnnnnnnnnnnnnnnnnnnnnnnnnnnnnnnnnnnnnnnnnnnnnnnnnnnnnnnnnnnnnnnnnnnnnnnnnnnnnnnnnnnnnnnnnnnnnnnnnnnnnnnnnnnnnnnnnnnnnnnnnnnnnnnnnnnnnnnnnnnnnnnnnnnnnnnnnnnnnnnnnnnnnnnnnnnnnnnnnnnnnnnnnnnnnnnnnnnnnnnnnnnnnnnnnnnnnnnnnnnnnnnnnnnnnnnnnnnnnnnnnnnnnnnnnnnnnnnnnnnnnnnnnnnnnnnnnnnnnnnnnnnnnnnnnnnnnnnnnnnnnnnnnnnnnnnnnnnnnnnnnnnnnnnnnnnnnnnnnnnnnnnnnnnnnnnnnnnnnnnnnnnnnnnnnnnnnnnnnnnnnnnnnnnnnnnnnnnnnnnnnnnnnnnnnnnnnnnnnnnnnnnnnnnnnnnnnnnnnnnnnnnnnnnnnnnnnnnnnnnnnnnnnnnnnnnnnnnnnnnnnnnnnnnnnnnnnnnnnnnnnnnnnnnnnnnnnnnnnnnnnnnnnnnnnnnnnnnnnnnnnnnnnnnnnnnnnnnnnnnnnnnnnnnnnnnnnnnnnnnnnnnnnnnnnnnnnnnnnnnnnnnnnnnnnnnnnnnnnnnnnnnnnnnnnnnnnnnnnnnnnnnnnnnnnnnnnnnnnnnnnnnnnnnnnnnnnnnnnnnnnnnnnnnnnnnnnnnnnnnnnnnnnnnnnnnnnnnnnnnnnnnnnnnnnnnnnnnnnnnnnnnnnnnnnnnnnnnnnnnnnnnnnnnnnnnnnnnnnnnnnnnnnnnnnnnnnnnnnnnnnnnnnnnnnnnnnnnnnnnnnnnnnnnnnnnnnnnnnnnnnnnnnnnnnnnnnnnnnnnnnnnnnnnnnnnnnnnnnnnnnnnnnnnnnnnnnnnnnnnnnnnnnnnnnnnnnnnnnnnnnnnnnnnnnnnnnnnnnnnnnnnnnnnnnnnnnnnnnnnnnnnnnnnnnnnnnnnnnnnnnnnnnnnnnnnnnnnnnnnnnnnnnnnnnnnnnnnnnnnnnnnnnnnnnnnnnnnnnnnnnnnnnnnnnnnnnnnnnnnnnnnnnnnnnnnnnnnnnnnnnnnnnnnnnnnnnnnnnnnnnnnnnnnnnnnnnnnnnnnnnnnnnnnnnnnnnnnnnnnnnnnnnnnnnnnnnnnnnnnnnnnnnnnnnnnnnnnnnnnnnnnnnnnnnnnnnnnnnnnnnnnnnnnnnnnnnnnnnnnnnnnnnnnnnnnnnnnnnnnnnnnnnnnnnnnnnnnnnnnnnnnnnnnnnnnnnnnnnnnnnnnnnnnnnnnnnnnnnnnnnnnnnnnnnnnnnnnnnnnnnnnnnnnnnnnnnnnnnnnnnnnnnnnnnnnnnnnnnnnnnnnnnnnnnnnnnnnnnnnnnnnnnnnnnnnnnnnnnnnnnnnnnnnnnnnnnnnnnnnnnnnnnnnnnnnnnnnnnnnnnnnnnnnnnnnnnnnnnnnnnnnnnnnnnnnnnnnnnnnnnnnnnnnnnnnnnnnnnnnnnnnnnnnnnnnnnnnnnnnnnnnnnnnnnnnnnnnnnnnnnnnnnnnnnnnnnnnnnnnnnnnnnnnnnnnnnnnnnnnnnnnnnnnnnnnnnnnnnnnnnnnnnnnnnnnnnnnnnnnnnnnnnnnnnnnnnnnnnnnnnnnnnnnnnnnnnnnnnnnnnnnnnnnnnnnnnnnnnnnnnnnnnnnnnnnnnnnnnnnnnnnnnnnnnnnnnnnnnnnnnnnnnnnnnnnnnnnnnnnnnnnnnnnnnnnnnnnnnnnnnnnnnnnnnnnnnnnnnnnnnnnnnnnnnnnnnnnnnnnnnnnnnnnnnnnnnnnnnnnnnnnnnnnnnnnnnnnnnnnnnnnnnnnnnnnnnnnnnnnnnnnnnnnnnnnnnnnnnnnnnnnnnnnnnnnnnnnnnnnnnnnnnnnnnnnnnnnnnnnnnnnnnnnnnnnnnnnnnnnnnnnnnnnnnnnnnnnnnnnnnnnnnnnnnnnnnnnnnnnnnnnnnnnnnnnnnnnnnnnnnnnnnnnnnnnnnnnnnnnnnnnnnnnnnnnnnnnnnnnnnnnnnnnnnnnnnnnnnnnnnnnnnnnnnnnnnnnnnnnnnnnnnnnnnnnnnnnnnnnnnnnnnnnnnnnnnnnnnnnnnnnnnnnnnnnnnnnnnnnnnnnnnnnnnnnnnnnnnnnnnnnnnnnnnnnnnnnnnnnnnnnnnnnnnnnnnnnnnnnnnnnnnnnnnnnnnnnnnnnnnnnnnnnnnnnnnnnnnnnnnnnnnnnnnnnnnnnnnnnnnnnnnnnnnnnnnnnnnnnnnnnnnnnnnnnnnnnnnnnnnnnnnnnnnnnnnnnnnnnnnnnnnnnnnnnnnnnnnnnnnnnnnnnnnnnnnnnnnnnnnnnnnnnnnnnnnnnnnnnnnnnnnnnnnnnnnnnnnnnnnnnnnnnnnnnnnnnnnnnnnnnnnnnnnnnnnnnnnnnnnnnnnnnnnnnnnnnnnnnnnnnnnnnnnnnnnnnnnnnnnnnnnnnnnnnnnnnnnnnnnnnnnnnnnnnnnnnnnnnnnnnnnnnnnnnnnnnnnnnnnnnnnnnnnnnnnnnnnnnnnnnnnnnnnnnnnnnnnnnnnnnnnnnnnnnnnnnnnnnnnnnnnnnnnnnnnnnnnnnnnnnnnnnnnnnnnnnnnnnnnnnnnnnnnnnnnnnnnnnnnnnnnnnnnnnnnnnnnnnnnnnnnnnnnnnnnnnnnnnnnnnnnnnnnnnnnnnnnnnnnnnnnnnnnnnnnnnnnnnnnnnnnnnnnnnnnnnnnnnnnnnnnnnnnnnnnnnnnnnnnnnnnnnnnnnnnnnnnnnnnnnnnnnnnnnnnnnnnnnnnnnnnnnnnnnnnnnnnnnnnnnnnnnnnnnnnnnnnnnnnnnnnnnnnnnnnnnnnnnnnnnnnnnnnnnnnnnnnnnnnnnnnnnnnnnnnnnnnnnnnnnnnnnnnnnnnnnnnnnnnnnnnnnnnnnnnnnnnnnnnnnnnnnnnnnnnnnnnnnnnnnnnnnnnnnnnnnnnnnnnnnnnnnnnnnnnnnnnnnnnnnnnnnnnnnnnnnnnnnnnnnnnnnnnnnnnnnnnnnnnnnnnnnnnnnnnnnnnnnnnnnnnnnnnnnnnnnnnnnnnnnnnnnnnnnnnnnnnnnnnnnnnnnnnnnnnnnnnnnnnnnnnnnnnnnnnnnnnnnnnnnnnnnnnnnnnnnnnnnnnnnnnnnnnnnnnnnnnnnnnnnnnnnnnnnnnnnnnnnnnnnnnnnnnnnnnnnnnnnnnnnnnnnnnnnnnnnnnnnnnnnnnnnnnnnnnnnnnnnnnnnnnnnnnnnnnnnnnnnnnnnnnnnnnnnnnnnnnnnnnnnnnnnnnnnnnnnnnnnnnnnnnnnnnnnnnnnnnnnnnnnnnnnnnnnnnnnnnnnnnnnnnnnnnnnnnnnnnnnnnnnnnnnnnnnnnnnnnnnnnnnnnnnnnnnnnnnnnnnnnnnnnnnnnnnnnnnnnnnnnnnnnnnnnnnnnnnnnnnnnnnnnnnnnnnnnnnnnnnnnnnnnnnnnnnnnnnnnnnnnnnnnnnnnnnnnnnnnnnnnnnnnnnnnnnnnnnnnnnnnnnnnnnnnnnnnnnnnnnnnnnnnnnnnnnnnnnnnnnnnnnnnnnnnnnnnnnnnnnnnnnnnnnnnnnnnnnnnnnnnnnnnnnnnnnnnnnnnnnnnnnnnnnnnnnnnnnnnnnnnnnnnnnnnnnnnnnnnnnnnnnnnnnnnnnnnnnnnnnnnnnnnnnnnnnnnnnnnnnnnnnnnnnnnnnnnnnnnnnnnnnnnnnnnnnnnnnnnnnnnnnnnnnnnnnnnnnnnnnnnnnnnnnnnnnnnnnnnnnnnnnnnnnnnnnnnnnnnnnnnnnnnnnnnnnnnnnnnnnnnnnnnnnnnnnnnnnnnnnnnnnnnnnnnnnnnnnnnnnnnnnnnnnnnnnnnnnnnnnnnnnnnnnnnnnnnnnnnnnnnnnnnnnnnnnnnnnnnnnnnnnnnnnnnnnnnnnnnnnnnnnnnnnnnnnnnnnnnnnnnnnnnnnnnnnnnnnnnnnnnnnnnnnnnnnnnnnnnnnnnnnnnnnnnnnnnnnnnnnnnnnnnnnnnnnnnnnnnnnnnnnnnnnnnnnnnnnnnnnnnnnnnnnnnnnnnnnnnnnnnnnnnnnnnnnnnnnnnnnnnnnnnnnnnnnnnnnnnnnnnnnnnnnnnnnnnnnnnnnnnnnnnnnnnnnnnnnnnnnnnnnnnnnnnnnnnnnnnnnnnnnnnnnnnnnnnnnnnnnnnnnnnnnnnnnnnnnnnnnnnnnnnnnnnnnnnnnnnnnnnnnnnnnnnnnnnnnnnnnnnnnnnnnnnnnnnnnnnnnnnnnnnnnnnnnnnnnnnnnnnnnnnnnnnnnnnnnnnnnnnnnnnnnnnnnnnnnnnnnnnnnnnnnnnnnnnnnnnnnnnnnnnnnnnnnnnnnnnnnnnnnnnnnnnnnnnnnnnnnnnnnnnnnnnnnnnnnnnnnnnnnnnnnnnnnnnnnnnnnnnnnnnnnnnnnnnnnnnnnnnnnnnnnnnnnnnnnnnnnnnnnnnnnnnnnnnnnnnnnnnnnnnnnnnnnnnnnnnnnnnnnnnnnnnnnnnnnnnnnnnnnnnnnnnnnnnnnnnnnnnnnnnnnnnnnnnnnnnnnnnnnnnnnnnnnnnnnnnnnnnnnnnnnnnnnnnnnnnnnnnnnnnnnnnnnnnnnnnnnnnnnnnnnnnnnnnnnnnnnnnnnnnnnnnnnnnnnnnnnnnnnnnnnnnnnnnnnnnnnnnnnnnnnnnnnnnnnnnnnnnnnnnnnnnnnnnnnnnnnnnnnnnnnnnnnnnnnnnnnnnnnnnnnnnnnnnnnnnnnnnnnnnnnnnnnnnnnnnnnnnnnnnnnnnnnnnnnnnnnnnnnnnnnnnnnnnnnnnnnnnnnnnnnnnnnnnnnnnnnnnnnnnnnnnnnnnnnnnnnnnnnnnnnnnnnnnnnnnnnnnnnnnnnnnnnnnnnnnnnnnnnnnnnnnnnnnnnnnnnnnnnnnnnnnnnnnnnnnnnnnnnnnnnnnnnnnnnnnnnnnnnnnnnnnnnnnnnnnnnnnnnnnnnnnnnnnnnnnnnnnnnnnnnnnnnnnnnnnnnnnnnnnnnnnnnnnnnnnnnnnnnnnnnnnnnnnnnnnnnnnnnnnnnnnnnnnnnnnnnnnnnnnnnnnnnnnnnnnnnnnnnnnnnnnnnnnnnnnnnnnnnnnnnnnnnnnnnnnnnnnnnnnnnnnnnnnnnnnnnnnnnnnnnnnnnnnnnnnnnnnnnnnnnnnnnnnnnnnnnnnnnnnnnnnnnnnnnnnnnnnnnnnnnnnnnnnnnnnnnnnnnnnnnnnnnnnnnnnnnnnnnnnnnnnnnnnnnnnnnnnnnnnnnnnnnnnnnnnnnnnnnnnnnnnnnnnnnnnnnnnnnnnnnnnnnnnnnnnnnnnnnnnnnnnnnnnnnnnnnnnnnnnnnnnnnnnnnnnnnnnnnnnnnnnnnnnnnnnnnnnnnnnnnnnnnnnnnnnnnnnnnnnnnnnnnnnnnnnnnnnnnnnnnnnnnnnnnnnnnnnnnnnnnnnnnnnnnnnnnnnnnnnnnnnnnnnnnnnnnnnnnnnnnnnnnnnnnnnnnnnnnnnnnnnnnnnnnnnnnnnnnnnnnnnnnnnnnnnnnnnnnnnnnnnnnnnnnnnnnnnnnnnnnnnnnnnnnnnnnnnnnnnnnnnnnnnnnnnnnnnnnnnnnnnnnnnnnnnnnnnnnnnnnnnnnnnnnnnnnnnnnnnnnnnnnnnnnnnnnnnnnnnnnnnnnnnnnnnnnnnnnnnnnnnnnnnnnnnnnnnnnnnnnnnnnnnnnnnnnnnnnnnnnnnnnnnnnnnnnnnnnnnnnnnnnnnnnnnnnnnnnnnnnnnnnnnnnnnnnnnnnnnnnnnnnnnnnnnnnnnnnnnnnnnnnnnnnnnnnnnnnnnnnnnnnnnnnnnnnnnnnnnnnnnnnnnnnnnnnnnnnnnnnnnnnnnnnnnnnnnnnnnnnnnnnnnnnnnnnnnnnnnnnnnnnnnnnnnnnnnnnnnnnnnnnnnnnnnnnnnnnnnnnnnnnnnnnnnnnnnnnnnnnnnnnnnnnnnnnnnnnnnnnnnnnnnnnnnnnnnnnnnnnnnnnnnnnnnnnnnnnnnnnnnnnnnnnnnnnnnnnnnnnnnnnnnnnnnnnnnnnnnnnnnnnnnnnnnnnnnnnnnnnnnnnnnnnnnnnnnnnnnnnnnnnnnnnnnnnnnnnnnnnnnnnnnnnnnnnnnnnnnnnnnnnnnnnnnnnnnnnnnnnnnnnnnnnnnnnnnnnnnnnnnnnnnnnnnnnnnnnnnnnnnnnnnnnnnnnnnnnnnnnnnnnnnnnnnnnnnnnnnnnnnnnnnnnnnnnnnnnnnnnnnnnnnnnnnnnnnnnnnnnnnnnnnnnnnnnnnnnnnnnnnnnnnnnnnnnnnnnnnnnnnnnnnnnnnnnnnnnnnnnnnnnnnnnnnnnnnnnnnnnnnnnnnnnnnnnnnnnnnnnnnnnnnnnnnnnnnnnnnnnnnnnnnnnnnnnnnnnnnnnnnnnnnnnnnnnnnnnnnnnnnnnnnnnnnnnnnnnnnnnnnnnnnnnnnnnnnnnnnnnnnnnnnnnnnnnnnnnnnnnnnnnnnnnnnnnnnnnnnnnnnnnnnnnnnnnnnnnnnnnnnnnnnnnnnnnnnnnnnnnnnnnnnnnnnnnnnnnnnnnnnnnnnnnnnnnnnnnnnnnnnnnnnnnnnnnnnnnnnnnnnnnnnnnnnnnnnnnnnnnnnnnnnnnnnnnnnnnnnnnnnnnnnnnnnnnnnnnnnnnnnnnnnnnnnnnnnnnnnnnnnnnnnnnnnnnnnnnnnnnnnnnnnnnnnnnnnnnnnnnnnnnnnnnnnnnnnnnnnnnnnnnnnnnnnnnnnnnnnnnnnnnnnnnnnnnnnnnnnnnnnnnnnnnnnnnnnnnnnnnnnnnnnnnnnnnnnnnnnnnnnnnnnnnnnnnnnnnnnnnnnnnnnnnnnnnnnnnnnnnnnnnnnnnnnnnnnnnnnnnnnnnnnnnnnnnnnnnnnnnnnnnnnnnnnnnnnnnnnnnnnnnnnnnnnnnnnnnnnnnnnnnnnnnnnnnnnnnnnnnnnnnnnnnnnnnnnnnnnnnnnnnnnnnnnnnnnnnnnnnnnnnnnnnnnnnnnnnnnnnnnnnnnnnnnnnnnnnnnnnnnnnnnnnnnnnnnnnnnnnnnnnnnnnnnnnnnnnnnnnnnnnnnnnnnnnnnnnnnnnnnnnnnnnnnnnnnnnnnnnnnnnnnnnnnnnnnnnnnnnnnnnnnnnnnnnnnnnnnnnnnnnnnnnnnnnnnnnnnnnnnnnnnnnnnnnnnnnnnnnnnnnnnnnnnnnnnnnnnnnnnnnnnnnnnnnnnnnnnnnnnnnnnnnnnnnnnnnnnnnnnnnnnnnnnnnnnnnnnnnnnnnnnnnnnnnnnnnnnnnnnnnnnnnnnnnnnnnnnnnnnnnnnnnnnnnnnnnnnnnnnnnnnnnnnnnnnnnnnnnnnnnnnnnnnnnnnnnnnnnnnnnnnnnnnnnnnnnnnnnnnnnnnnnnnnnnnnnnnnnnnnnnnnnnnnnnnnnnnnnnnnnnnnnnnnnnnnnnnnnnnnnnnnnnnnnnnnnnnnnnnnnnnnnnnnnnnnnnnnnnnnnnnnnnnnnnnnnnnnnnnnnnnnnnnnnnnnnnnnnnnnnnnnnnnnnnnnnnnnnnnnnnnnnnnnnnnnnnnnnnnnnnnnnnnnnnnnnnnnnnnnnnnnnnnnnnnnnnnnnnnnnnnnnnnnnnnnnnnnnnnnnnnnnnnnnnnnnnnnnnnnnnnnnnnnnnnnnnnnnnnnnnnnnnnnnnnnnnnnnnnnnnnnnnnnnnnnnnnnnnnnnnnnnnnnnnnnnnnnnnnnnnnnnnnnnnnnnnnnnnnnnnnnnnnnnnnnnnnnnnnnnnnnnnnnnnnnnnnnnnnnnnnnnnnnnnnnnnnnnnnnnnnnnnnnnnnnnnnnnnnnnnnnnnnnnnnnnnnnnnnnnnnnnnnnnnnnnnnnnnnnnnnnnnnnnnnnnnnnnnnnnnnnnnnnnnnnnnnnnnnnnnnnnnnnnnnnnnnnnnnnnnnnnnnnnnnnnnnnnnnnnnnnnnnnnnnnnnnnnnnnnnnnnnnnnnnnnnnnnnnnnnnnnnnnnnnnnnnnnnnnnnnnnnnnnnnnnnnnnnnnnnnnnnnnnnnnnnnnnnnnnnnnnnnnnnnnnnnnnnnnnnnnnnnnnnnnnnnnnnnnnnnnnnnnnnnnnnnnnnnnnnnnnnnnnnnnnnnnnnnnnnnnnnnnnnnnnnnnnnnnnnnnnnnnnnnnnnnnnnnnnnnnnnnnnnnnnnnnnnnnnnnnnnnnnnnnnnnnnnnnnnnnnnnnnnnnnnnnnnnnnnnnnnnnnnnnnnnnnnnnnnnnnnnnnnnnnnnnnnnnnnnnnnnnnnnnnnnnnnnnnnnnnnnnnnnnnnnnnnnnnnnnnnnnnnnnnnnnnnnnnnnnnnnnnnnnnnnnnnnnnnnnnnnnnnnnnnnnnnnnnnnnnnnnnnnnnnnnnnnnnnnnnnnnnnnnnnnnnnnnnnnnnnnnnnnnnnnnnnnnnnnnnnnnnnnnnnnnnnnnnnnnnnnnnnnnnnnnnnnnnnnnnnnnnnnnnnnnnnnnnnnnnnnnnnnnnnnnnnnnnnnnnnnnnnnnnnnnnnnnnnnnnnnnnnnnnnnnnnnnnnnnnnnnnnnnnnnnnnnnnnnnnnnnnnnnnnnnnnnnnnnnnnnnnnnnnnnnnnnnnnnnnnnnnnnnnnnnnnnnnnnnnnnnnnnnnnnnnnnnnnnnnnnnnnnnnnnnnnnnnnnnnnnnnnnnnnnnnnnnnnnnnnnnnnnnnnnnnnnnnnnnnnnnnnnnnnnnnnnnnnnnnnnnnnnnnnnnnnnnnnnnnnnnnnnnnnnnnnnnnnnnnnnnnnnnnnnnnnnnnnnnnnnnnnnnnnnnnnnnnnnnnnnnnnnnnnnnnnnnnnnnnnnnnnnnnnnnnnnnnnnnnnnnnnnnnnnnnnnnnnnnnnnnnnnnnnnnnnnnnnnnnnnnnnnnnnnnnnnnnnnnnnnnnnnnnnnnnnnnnnnnnnnnnnnnnnnnnnnnnnnnnnnnnnnnnnnnnnnnnnnnnnnnnnnnnnnnnnnnnnnnnnnnnnnnnnnnnnnnnnnnnnnnnnnnnnnnnnnnnnnnnnnnnnnnnnnnnnnnnnnnnnnnnnnnnnnnnnnnnnnnnnnnnnnnnnnnnnnnnnnnnnnnnnnnnnnnnnnnnnnnnnnnnnnnnnnnnnnnnnnnnnnnnnnnnnnnnnnnnnnnnnnnnnnnnnnnnnnnnnnnnnnnnnnnnnnnnnnnnnnnnnnnnnnnnnnnnnnnnnnnnnnnnnnnnnnnnnnnnnnnnnnnnnnnnnnnnnnnnnnnnnnnnnnnnnnnnnnnnnnnnnnnnnnnnnnnnnnnnnnnnnnnnnnnnnnnnnnnnnnnnnnnnnnnnnnnnnnnnnnnnnnnnnnnnnnnnnnnnnnnnnnnnnnnnnnnnnnnnnnnnnnnnnnnnnnnnnnnnnnnnnnnnnnnnnnnnnnnnnnnnnnnnnnnnnnnnnnnnnnnnnnnnnnnnnnnnnnnnnnnnnnnnnnnnnnnnnnnnnnnnnnnnnnnnnnnnnnnnnnnnnnnnnnnnnnnnnnnnnnnnnnnnnnnnnnnnnnnnnnnnnnnnnnnnnnnnnnnnnnnnnnnnnnnnnnnnnnnnnnnnnnnnnnnnnnnnnnnnnnnnnnnnnnnnnnnnnnnnnnnnnnnnnnnnnnnnnnnnnnnnnnnnnnnnnnnnnnnnnnnnnnnnnnnnnnnnnnnnnnnnnnnnnnnnnnnnnnnnnnnnnnnnnnnnnnnnnnnnnnnnnnnnnnnnnnnnnnnnnnnnnnnnnnnnnnnnnnnnnnnnnnnnnnnnnnnnnnnnnnnnnnnnnnnnnnnnnnnnnnnnnnnnnnnnnnnnnnnnnnnnnnnnnnnnnnnnnnnnnnnnnnnnnnnnnnnnnnnnnnnnnnnnnnnnnnnnnnnnnnnnnnnnnnnnnnnnnnnnnnnnnnnnnnnnnnnnnnnnnnnnnnnnnnnnnnnnnnnnnnnnnnnnnnnnnnnnnnnnnnnnnnnnnnnnnnnnnnnnnnnnnnnnnnnnnnnnnnnnnnnnnnnnnnnnnnnnnnnnnnnnnnnnnnnnnnnnnnnnnnnnnnnnnnnnnnnnnnnnnnnnnnnnnnnnnnnnnnnnnnnnnnnnnnnnnnnnnnnnnnnnnnnnnnnnnnnnnnnnnnnnnnnnnnnnnnnnnnnnnnnnnnnnnnnnnnnnnnnnnnnnnnnnnnnnnnnnnnnnnnnnnnnnnnnnnnnnnnnnnnnnnnnnnnnnnnnnnnnnnnnnnnnnnnnnnnnnnnnnnnnnnnnnnnnnnnnnnnnnnnnnnnnnnnnnnnnnnnnnnnnnnnnnnnnnnnnnnnnnnnnnnnnnnnnnnnnnnnnnnnnnnnnnnnnnnnnnnnnnnnnnnnnnnnnnnnnnnnnnnnnnnnnnnnnnnnnnnnnnnnnnnnnnnnnnnnnnnnnnnnnnnnnnnnnnnnnnnnnnnnnnnnnnnnnnnnnnnnnnnnnnnnnnnnnnnnnnnnnnnnnnnnnnnnnnnnnnnnnnnnnnnnnnnnnnnnnnnnnnnnnnnnnnnnnnnnnnnnnnnnnnnnnnnnnnnnnnnnnnnnnnnnnnnnnnnnnnnnnnnnnnnnnnnnnnnnnnnnnnnnnnnnnnnnnnnnnnnnnnnnnnnnnnnnnnnnnnnnnnnnnnnnnnnnnnnnnnnnnnnnnnnnnnnnnnnnnnnnnnnnnnnnnnnnnnnnnnnnnnnnnnnnnnnnnnnnnnnnnnnnnnnnnnnnnnnnnnnnnnnnnnnnnnnnnnnnnnnnnnnnnnnnnnnnnnnnnnnnnnnnnnnnnnnnnnnnnnnnnnnnnnnnnnnnnnnnnnnnnnnnnnnnnnnnnnnnnnnnnnnnnnnnnnnnnnnnnnnnnnnnnnnnnnnnnnnnnnnnnnnnnnnnnnnnnnnnnnnnnnnnnnnnnnnnnnnnnnnnnnnnnnnnnnnnnnnnnnnnnnnnnnnnnnnnnnnnnnnnnnnnnnnnnnnnnnnnnnnnnnnnnnnnnnnnnnnnnnnnnnnnnnnnnnnnnnnnnnnnnnnnnnnnnnnnnnnnnnnnnnnnnnnnnnnnnnnnnnnnnnnnnnnnnnnnnnnnnnnnnnnnnnnnnnnnnnnnnnnnnnnnnnnnnnnnnnnnnnnnnnnnnnnnnnnnnnnnnnnnnnnnnnnnnnnnnnnnnnnnnnnnnnnnnnnnnnnnnnnnnnnnnnnnnnnnnnnnnnnnnnnnnnnnnnnnnnnnnnnnnnnnnnnnnnnnnnnnnnnnnnnnnnnnnnnnnnnnnnnnnnnnnnnnnnnnnnnnnnnnnnnnnnnnnnnnnnnnnnnnnnnnnnnnnnnnnnnnnnnnnnnnnnnnnnnnnnnnnnnnnnnnnnnnnnnnnnnnnnnnnnnnnnnnnnnnnnnnnnnnnnnnnnnnnnnnnnnnnnnnnnnnnnnnnnnnnnnnnnnnnnnnnnnnnnnnnnnnnnnnnnnnnnnnnnnnnnnnnnnnnnnnnnnnnnnnnnnnnnnnnnnnnnnnnnnnnnnnnnnnnnnnnnnnnnnnnnnnnnnnnnnnnnnnnnnnnnnnnnnnnnnnnnnnnnnnnnnnnnnnnnnnnnnnnnnnnnnnnnnnnnnnnnnnnnnnnnnnnnnnnnnnnnnnnnnnnnnnnnnnnnnnnnnnnnnnnnnnnnnnnnnnnnnnnnnnnnnnnnnnnnnnnnnnnnnnnnnnnnnnnnnnnnnnnnnnnnnnnnnnnnnnnnnnnnnnnnnnnnnnnnnnnnnnnnnnnnnnnnnnnnnnnnnnnnnnnnnnnnnnnnnnnnnnnnnnnnnnnnnnnnnnnnnnnnnnnnnnnnnnnnnnnnnnnnnnnnnnnnnnnnnnnnnnnnnnnnnnnnnnnnnnnnnnnnnnnnnnnnnnnnnnnnnnnnnnnnnnnnnnnnnnnnnnnnnnnnnnnnnnnnnnnnnnnnnnnnnnnnnnnnnnnnnnnnnnnnnnnnnnnnnnnnnnnnnnnnnnnnnnnnnnnnnnnnnnnnnnnnnnnnnnnnnnnnnnnnnnnnnnnnnnnnnnnnnnnnnnnnnnnnnnnnnnnnnnnnnnnnnnnnnnnnnnnnnnnnnnnnnnnnnnnnnnnnnnnnnnnnnnnnnnnnnnnnnnnnnnnnnnnnnnnnnnnnnnnnnnnnnnnnnnnnnnnnnnnnnnnnnnnnnnnnnnnnnnnnnnnnnnnnnnnnnnnnnnnnnnnnnnnnnnnnnnnnnnnnnnnnnnnnnnnnnnnnnnnnnnnnnnnnnnnnnnnnnnnnnnnnnnnnnnnnnnnnnnnnnnnnnnnnnnnnnnnnnnnnnnnnnnnnnnnnnnnnnnnnnnnnnnnnnnnnnnnnnnnnnnnnnnnnnnnnnnnnnnnnnnnnnnnnnnnnnnnnnnnnnnnnnnnnnnnnnnnnnnnnnnnnnnnnnnnnnnnnnnnnnnnnnnnnnnnnnnnnnnnnnnnnnnnnnnnnnnnnnnnnnnnnnnnnnnnnnnnnnnnnnnnnnnnnnnnnnnnnnnnnnnnnnnnnnnnnnnnnnnnnnnnnnnnnnnnnnnnnnnnnnnnnnnnnnnnnnnnnnnnnnnnnnnnnnnnnnnnnnnnnnnnnnnnnnnnnnnnnnnnnnnnnnnnnnnnnnnnnnnnnnnnnnnnnnnnnnnnnnnnnnnnnnnnnnnnnnnnnnnnnnnnnnnnnnnnnnnnnnnnnnnnnnnnnnnnnnnnnnnnnnnnnnnnnnnnnnnnnnnnnnnnnnnnnnnnnnnnnnnnnnnnnnnnnnnnnnnnnnnnnnnnnnnnnnnnnnnnnnnnnnnnnnnnnnnnnnnnnnnnnnnnnnnnnnnnnnnnnnnnnnnnnnnnnnnnnnnnnnnnnnnnnnnnnnnnnnnnnnnnnnnnnnnnnnnnnnnnnnnnnnnnnnnnnnnnnnnnnnnnnnnnnnnnnnnnnnnnnnnnnnnnnnnnnnnnnnnnnnnnnnnnnnnnnnnnnnnnnnnnnnnnnnnnnnnnnnnnnnnnnnnnnnnnnnnnnnnnnnnnnnnnnnnnnnnnnnnnnnnnnnnnnnnnnnnnnnnnnnnnnnnnnnnnnnnnnnnnnnnnnnnnnnnnnnnnnnnnnnnnnnnnnnnnnnnnnnnnnnnnnnnnnnnnnnnnnnnnnnnnnnnnnnnnnnnnnnnnnnnnnnnnnnnnnnnnnnnnnnnnnnnnnnnnnnnnnnnnnnnnnnnnnnnnnnnnnnnnnnnnnnnnnnnnnnnnnnnnnnnnnnnnnnnnnnnnnnnnnnnnnnnnnnnnnnnnnnnnnnnnnnnnnnnnnnnnnnnnnnnnnnnnnnnnnnnnnnnnnnnnnnnnnnnnnnnnnnnnnnnnnnnnnnnnnnnnnnnnnnnnnnnnnnnnnnnnnnnnnnnnnnnnnnnnnnnnnnnnnnnnnnnnnnnnnnnnnnnnnnnnnnnnnnnnnnnnnnnnnnnnnnnnnnnnnnnnnnnnnnnnnnnnnnnnnnnnnnnnnnnnnnnnnnnnnnnnnnnnnnnnnnnnnnnnnnnnnnnnnnnnnnnnnnnnnnnnnnnnnnnnnnnnnnnnnnnnnnnnnnnnnnnnnnnnnnnnnnnnnnnnnnnnnnnnnnnnnnnnnnnnnnnnnnnnnnnnnnnnnnnnnnnnnnnnnnnnnnnnnnnnnnnnnnnnnnnnnnnnnnnnnnnnnnnnnnnnnnnnnnnnnnnnnnnnnnnnnnnnnnnnnnnnnnnnnnnnnnnnnnnnnnnnnnnnnnnnnnnnnnnnnnnnnnnnnnnnnnnnnnnnnnnnnnnnnnnnnnnnnnnnnnnnnnnnnnnnnnnnnnnnnnnnnnnnnnnnnnnnnnnnnnnnnnnnnnnnnnnnnnnnnnnnnnnnnnnnnnnnnnnnnnnnnnnnnnnnnnnnnnnnnnnnnnnnnnnnnnnnnnnnnnnnnnnnnnnnnnnnnnnnnnnnnnnnnnnnnnnnnnnnnnnnnnnnnnnnnnnnnnnnnnnnnnnnnnnnnnnnnnnnnnnnnnnnnnnnnnnnnnnnnnnnnnnnnnnnnnnnnnnnnnnnnnnnnnnnnnnnnnnnnnnnnnnnnnnnnnnnnnnnnnnnnnnnnnnnnnnnnnnnnnnnnnnnnnnnnnnnnnnnnnnnnnnnnnnnnnnnnnnnnnnnnnnnnnnnnnnnnnnnnnnnnnnnnnnnnnnnnnnnnnnnnnnnnnnnnnnnnnnnnnnnnnnnnnnnnnnnnnnnnnnnnnnnnnnnnnnnnnnnnnnnnnnnnnnnnnnnnnnnnnnnnnnnnnnnnnnnnnnnnnnnnnnnnnnnnnnnnnnnnnnnnnnnnnnnnnnnnnnnnnnnnnnnnnnnnnnnnnnnnnnnnnnnnnnnnnnnnnnnnnnnnnnnnnnnnnnnnnnnnnnnnnnnnnnnnnnnnnnnnnnnnnnnnnnnnnnnnnnnnnnnnnnnnnnnnnnnnnnnnnnnnnnnnnnnnnnnnnnnnnnnnnnnnnnnnnnnnnnnnnnnnnnnnnnnnnnnnnnnnnnnnnnnnnnnnnnnnnnnnnnnnnnnnnnnnnnnnnnnnnnnnnnnnnnnnnnnnnnnnnnnnnnnnnnnnnnnnnnnnnnnnnnnnnnnnnnnnnnnnnnnnnnnnnnnnnnnnnnnnnnnnnnnnnnnnnnnnnnnnnnnnnnnnnnnnnnnnnnnnnnnnnnnnnnnnnnnnnnnnnnnnnnnnnnnnnnnnnnnnnnnnnnnnnnnnnnnnnnnnnnnnnnnnnnnnnnnnnnnnnnnnnnnnnnnnnnnnnnnnnnnnnnnnnnnnnnnnnnnnnnnnnnnnnnnnnnnnnnnnnnnnnnnnnnnnnnnnnnnnnnnnnnnnnnnnnnnnnnnnnnnnnnnnnnnnnnnnnnnnnnnnnnnnnnnnnnnnnnnnnnnnnnnnnnnnnnnnnnnnnnnnnnnnnnnnnnnnnnnnnnnnnnnnnnnnnnnnnnnnnnnnnnnnnnnnnnnnnnnnnnnnnnnnnnnnnnnnnnnnnnnnnnnnnnnnnnnnnnnnnnnnnnnnnnnnnnnnnnnnnnnnnnnnnnnnnnnnnnnnnnnnnnnnnnnnnnnnnnnnnnnnnnnnnnnnnnnnnnnnnnnnnnnnnnnnnnnnnnnnnnnnnnnnnnnnnnnnnnnnnnnnnnnnnnnnnnnnnnnnnnnnnnnnnnnnnnnnnnnnnnnnnnnnnnnnnnnnnnnnnnnnnnnnnnnnnnnnnnnnnnnnnnnnnnnnnnnnnnnnnnnnnnnnnnnnnnnnnnnnnnnnnnnnnnnnnnnnnnnnnnnnnnnnnnnnnnnnnnnnnnnnnnnnnnnnnnnnnnnnnnnnnnnnnnnnnnnnnnnnnnnnnnnnnnnnnnnnnnnnnnnnnnnnnnnnnnnnnnnnnnnnnnnnnnnnnnnnnnnnnnnnnnnnnnnnnnnnnnnnnnnnnnnnnnnnnnnnnnnnnnnnnnnnnnnnnnnnnnnnnnnnnnnnnnnnnnnnnnnnnnnnnnnnnnnnnnnnnnnnnnnnnnnnnnnnnnnnnnnnnnnnnnnnnnnnnnnnnnnnnnnnnnnnnnnnnnnnnnnnnnnnnnnnnnnnnnnnnnnnnnnnnnnnnnnnnnnnnnnnnnnnnnnnnnnnnnnnnnnnnnnnnnnnnnnnnnnnnnnnnnnnnnnnnnnnnnnnnnnnnnnnnnnnnnnnnnnnnnnnnnnnnnnnnnnnnnnnnnnnnnnnnnnnnnnnnnnnnnnnnnnnnnnnnnnnnnnnnnnnnnnnnnnnnnnnnnnnnnnnnnnnnnnnnnnnnnnnnnnnnnnnnnnnnnnnnnnnnnnnnnnnnnnnnnnnnnnnnnnnnnnnnnnnnnnnnnnnnnnnnnnnnnnnnnnnnnnnnnnnnnnnnnnnnnnnnnnnnnnnnnnnnnnnnnnnnnnnnnnnnnnnnnnnnnnnnnnnnnnnnnnnnnnnnnnnnnnnnnnnnnnnnnnnnnnnnnnnnnnnnnnnnnnnnnnnnnnnnnnnnnnnnnnnnnnnnnnnnnnnnnnnnnnnnnnnnnnnnnnnnnnnnnnnnnnnnnnnnnnnnnnnnnnnnnnnnnnnnnnnnnnnnnnnnnnnnnnnnnnnnnnnnnnnnnnnnnnnnnnnnnnnnnnnnnnnnnnnnnnnnnnnnnnnnnnnnnnnnnnnnnnnnnnnnnnnnnnnnnnnnnnnnnnnnnnnnnnnnnnnnnnnnnnnnnnnnnnnnnnnnnnnnnnnnnnnnnnnnnnnnnnnnnnnnnnnnnnnnnnnnnnnnnnnnnnnnnnnnnnnnnnnnnnnnnnnnnnnnnnnnnnnnnnnnnnnnnnnnnnnnnnnnnnnnnnnnnnnnnnnnnnnnnnnnnnnnnnnnnnnnnnnnnnnnnnnnnnnnnnnnnnnnnnnnnnnnnnnnnnnnnnnnnnnnnnnnnnnnnnnnnnnnnnnnnnnnnnnnnnnnnnnnnnnnnnnnnnnnnnnnnnnnnnnnnnnnnnnnnnnnnnnnnnnnnnnnnnnnnnnnnnnnnnnnnnnnnnnnnnnnnnnnnnnnnnnnnnnnnnnnnnnnnnnnnnnnnnnnnnnnnnnnnnnnnnnnnnnnnnnnnnnnnnnnnnnnnnnnnnnnnnnnnnnnnnnnnnnnnnnnnnnnnnnnnnnnnnnnnnnnnnnnnnnnnnnnnnnnnnnnnnnnnnnnnnnnnnnnnnnnnnnnnnnnnnnnnnnnnnnnnnnnnnnnnnnnnnnnnnnnnnnnnnnnnnnnnnnnnnnnnnnnnnnnnnnnnnnnnnnnnnnnnnnnnnnnnnnnnnnnnnnnnnnnnnnnnnnnnnnnnnnnnnnnnnnnnnnnnnnnnnnnnnnnnnnnnnnnnnnnnnnnnnnnnnnnnnnnnnnnnnnnnnnnnnnnnnnnnnnnnnnnnnnnnnnnnnnnnnnnnnnnnnnnnnnnnnnnnnnnnnnnnnnnnnnnnnnnnnnnnnnnnnnnnnnnnnnnnnnnnnnnnnnnnnnnnnnnnnnnnnnnnnnnnnnnnnnnnnnnnnnnnnnnnnnnnnnnnnnnnnnnnnnnnnnnnnnnnnnnnnnnnnnnnnnnnnnnnnnnnnnnnnnnnnnnnnnnnnnnnnnnnnnnnnnnnnnnnnnnnnnnnnnnnnnnnnnnnnnnnnnnnnnnnnnnnnnnnnnnnnnnnnnnnnnnnnnnnnnnnnnnnnnnnnnnnnnnnnnnnnnnnnnnnnnnnnnnnnnnnnnnnnnnnnnnnnnnnnnnnnnnnnnnnnnnnnnnnnnnnnnnnnnnnnnnnnnnnnnnnnnnnnnnnnnnnnnnnnnnnnnnnnnnnnnnnnnnnnnnnnnnnnnnnnnnnnnnnnnnnnnnnnnnnnnnnnnnnnnnnnnnnnnnnnnnnnnnnnnnnnnnnnnnnnnnnnnnnnnnnnnnnnnnnnnnnnnnnnnnnnnnnnnnnnnnnnnnnnnnnnnnnnnnnnnnnnnnnnnnnnnnnnnnnnnnnnnnnnnnnnnnnnnnnnnnnnnnnnnnnnnnnnnnnnnnnnnnnnnnnnnnnnnnnnnnnnnnnnnnnnnnnnnnnnnnnnnnnnnnnnnnnnnnnnnnnnnnnnnnnnnnnnnnnnnnnnnnnnnnnnnnnnnnnnnnnnnnnnnnnnnnnnnnnnnnnnnnnnnnnnnnnnnnnnnnnnnnnnnnnnnnnnnnnnnnnnnnnnnnnnnnnnnnnnnnnnnnnnnnnnnnnnnnnnnnnnnnnnnnnnnnnnnnnnnnnnnnnnnnnnnnnnnnnnnnnnnnnnnnnnnnnnnnnnnnnnnnnnnnnnnnnnnnnnnnnnnnnnnnnnnnnnnnnnnnnnnnnnnnnnnnnnnnnnnnnnnnnnnnnnnnnnnnnnnnnnnnnnnnnnnnnnnnnnnnnnnnnnnnnnnnnnnnnnnnnnnnnnnnnnnnnnnnnnnnnnnnnnnnnnnnnnnnnnnnnnnnnnnnnnnnnnnnnnnnnnnnnnnnnnnnnnnnnnnnnnnnnnnnnnnnnnnnnnnnnnnnnnnnnnnnnnnnnnnnnnnnnnnnnnnnnnnnnnnnnnnnnnnnnnnnnnnnnnnnnnnnnnnnnnnnnnnnnnnnnnnnnnnnnnnnnnnnnnnnnnnnnnnnnnnnnnnnnnnnnnnnnnnnnnnnnnnnnnnnnnnnnnnnnnnnnnnnnnnnnnnnnnnnnnnnnnnnnnnnnnnnnnnnnnnnnnnnnnnnnnnnnnnnnnnnnnnnnnnnnnnnnnnnnnnnnnnnnnnnnnnnnnnnnnnnnnnnnnnnnnnnnnnnnnnnnnnnnnnnnnnnnnnnnnnnnnnnnnnnnnnnnnnnnnnnnnnnnnnnnnnnnnnnnnnnnnnnnnnnnnnnnnnnnnnnnnnnnnnnnnnnnnnnnnnnnnnnnnnnnnnnnnnnnnnnnnnnnnnnnnnnnnnnnnnnnnnnnnnnnnnnnnnnnnnnnnnnnnnnnnnnnnnnnnnnnnnnnnnnnnnnnnnnnnnnnnnnnnnnnnnnnnnnnnnnnnnnnnnnnnnnnnnnnnnnnnnnnnnnnnnnnnnnnnnnnnnnnnnnnnnnnnnnnnnnnnnnnnnnnnnnnnnnnnnnnnnnnnnnnnnnnnnnnnnnnnnnnnnnnnnnnnnnnnnnnnnnnnnnnnnnnnnnnnnnnnnnnnnnnnnnnnnnnnnnnnnnnnnnnnnnnnnnnnnnnnnnnnnnnnnnnnnnnnnnnnnnnnnnnnnnnnnnnnnnnnnnnnnnnnnnnnnnnnnnnnnnnnnnnnnnnnnnnnnnnnnnnnnnnnnnnnnnnnnnnnnnnnnnnnnnnnnnnnnnnnnnnnnnnnnnnnnnnnnnnnnnnnnnnnnnnnnnnnnnnnnnnnnnnnnnnnnnnnnnnnnnnnnnnnnnnnnnnnnnnnnnnnnnnnnnnnnnnnnnnnnnnnnnnnnnnnnnnnnnnnnnnnnnnnnnnnnnnnnnnnnnnnnnnnnnnnnnnnnnnnnnnnnnnnnnnnnnnnnnnnnnnnnnnnnnnnnnnnnnnnnnnnnnnnnnnnnnnnnnnnnnnnnnnnnnnnnnnnnnnnnnnnnnnnnnnnnnnnnnnnnnnnnnnnnnnnnnnnnnnnnnnnnnnnnnnnnnnnnnnnnnnnnnnnnnnnnnnnnnnnnnnnnnnnnnnnnnnnnnnnnnnnnnnnnnnnnnnnnnnnnnnnnnnnnnnnnnnnnnnnnnnnnnnnnnnnnnnnnnnnnnnnnnnnnnnnnnnnnnnnnnnnnnnnnnnnnnnnnnnnnnnnnnnnnnnnnnnnnnnnnnnnnnnnnnnnnnnnnnnnnnnnnnnnnnnnnnnnnnnnnnnnnnnnnnnnnnnnnnnnnnnnnnnnnnnnnnnnnnnnnnnnnnnnnnnnnnnnnnnnnnnnnnnnnnnnnnnnnnnnnnnnnnnnnnnnnnnnnnnnnnnnnnnnnnnnnnnnnnnnnnnnnnnnnnnnnnnnnnnnnnnnnnnnnnnnnnnnnnnnnnnnnnnnnnnnnnnnnnnnnnnnnnnnnnnnnnnnnnnnnnnnnnnnnnnnnnnnnnnnnnnnnnnnnnnnnnnnnnnnnnnnnnnnnnnnnnnnnnnnnnnnnnnnnnnnnnnnnnnnnnnnnnnnnnnnnnnnnnnnnnnnnnnnnnnnnnnnnnnnnnnnnnnnnnnnnnnnnnnnnnnnnnnnnnnnnnnnnnnnnnnnnnnnnnnnnnnnnnnnnnnnnnnnnnnnnnnnnnnnnnnnnnnnnnnnnnnnnnnnnnnnnnnnnnnnnnnnnnnnnnnnnnnnnnnnnnnnnnnnnnnnnnnnnnnnnnnnnnnnnnnnnnnnnnnnnnnnnnnnnnnnnnnnnnnnnnnnnnnnnnnnnnnnnnnnnnnnnnnnnnnnnnnnnnnnnnnnnnnnnnnnnnnnnnnnnnnnnnnnnnnnnnnnnnnnnnnnnnnnnnnnnnnnnnnnnnnnnnnnnnnnnnnnnnnnnnnnnnnnnnnnnnnnnnnnnnnnnnnnnnnnnnnnnnnnnnnnnnnnnnnnnnnnnnnnnnnnnnnnnnnnnnnnnnnnnnnnnnnnnnnnnnnnnnnnnnnnnnnnnnnnnnnnnnnnnnnnnnnnnnnnnnnnnnnnnnnnnnnnnnnnnnnnnnnnnnnnnnnnnnnnnnnnnnnnnnnnnnnnnnnnnnnnnnnnnnnnnnnnnnnnnnnnnnnnnnnnnnnnnnnnnnnnnnnnnnnnnnnnnnnnnnnnnnnnnnnnnnnnnnnnnnnnnnnnnnnnnnnnnnnnnnnnnnnnnnnnnnnnnnnnnnnnnnnnnnnnnnnnnnnnnnnnnnnnnnnnnnnnnnnnnnnnnnnnnnnnnnnnnnnnnnnnnnnnnnnnnnnnnnnnnnnnnnnnnnnnnnnnnnnnnnnnnnnnnnnnnnnnnnnnnnnnnnnnnnnnnnnnnnnnnnnnnnnnnnnnnnnnnnnnnnnnnnnnnnnnnnnnnnnnnnnnnnnnnnnnnnnnnnnnnnnnnnnnnnnnnnnnnnnnnnnnnnnnnnnnnnnnnnnnnnnnnnnnnnnnnnnnnnnnnnnnnnnnnnnnnnnnnnnnnnnnnnnnnnnnnnnnnnnnnnnnnnnnnnnnnnnnnnnnnnnnnnnnnnnnnnnnnnnnnnnnnnnnnnnnnnnnnnnnnnnnnnnnnnnnnnnnnnnnnnnnnnnnnnnnnnnnnnnnnnnnnnnnnnnnnnnnnnnnnnnnnnnnnnnnnnnnnnnnnnnnnnnnnnnnnnnnnnnnnnnnnnnnnnnnnnnnnnnnnnnnnnnnnnnnnnnnnnnnnnnnnnnnnnnnnnnnnnnnnnnnnnnnnnnnnnnnnnnnnnnnnnnnnnnnnnnnnnnnnnnnnnnnnnnnnnnnnnnnnnnnnnnnnnnnnnnnnnnnnnnnnnnnnnnnnnnnnnnnnnnnnnnnnnnnnnnnnnnnnnnnnnnnnnnnnnnnnnnnnnnnnnnnnnnnnnnnnnnnnnnnnnnnnnnnnnnnnnnnnnnnnnnnnnnnnnnnnnnnnnnnnnnnnnnnnnnnnnnnnnnnnnnnnnnnnnnnnnnnnnnnnnnnnnnnnnnnnnnnnnnnnnnnnnnnnnnnnnnnnnnnnnnnnnnnnnnnnnnnnnnnnnnnnnnnnnnnnnnnnnnnnnnnnnnnnnnnnnnnnnnnnnnnnnnnnnnnnnnnnnnnnnnnnnnnnnnnnnnnnnnnnnnnnnnnnnnnnnnnnnnnnnnnnnnnnnnnnnnnnnnnnnnnnnnnnnnnnnnnnnnnnnnnnnnnnnnnnnnnnnnnnnnnnnnnnnnnnnnnnnnnnnnnnnnnnnnnnnnnnnnnnnnnnnnnnnnnnnnnnnnnnnnnnnnnnnnnnnnnnnnnnnnnnnnnnnnnnnnnnnnnnnnnnnnnnnnnnnnnnnnnnnnnnnnnnnnnnnnnnnnnnnnnnnnnnnnnnnnnnnnnnnnnnnnnnnnnnnnnnnnnnnnnnnnnnnnnnnnnnnnnnnnnnnnnnnnnnnnnnnnnnnnnnnnnnnnnnnnnnnnnnnnnnnnnnnnnnnnnnnnnnnnnnnnnnnnnnnnnnnnnnnnnnnnnnnnnnnnnnnnnnnnnnnnnnnnnnnnnnnnnnnnnnnnnnnnnnnnnnnnnnnnnnnnnnnnnnnnnnnnnnnnnnnnnnnnnnnnnnnnnnnnnnnnnnnnnnnnnnnnnnnnnnnnnnnnnnnnnnnnnnnnnnnnnnnnnnnnnnnnnnnnnnnnnnnnnnnnnnnnnnnnnnnnnnnnnnnnnnnnnnnnnnnnnnnnnnnnnnnnnnnnnnnnnnnnnnnnnnnnnnnnnnnnnnnnnnnnnnnnnnnnnnnnnnnnnnnnnnnnnnnnnnnnnnnnnnnnnnnnnnnnnnnnnnnnnnnnnnnnnnnnnnnnnnnnnnnnnnnnnnnnnnnnnnnnnnnnnnnnnnnnnnnnnnnnnnnnnnnnnnnnnnnnnnnnnnnnnnnnnnnnnnnnnnnnnnnnnnnnnnnnnnnnnnnnnnnnnnnnnnnnnnnnnnnnnnnnnnnnnnnnnnnnnnnnnnnnnnnnnnnnnnnnnnnnnnnnnnnnnnnnnnnnnnnnnnnnnnnnnnnnnnnnnnnnnnnnnnnnnnnnnnnnnnnnnnnnnnnnnnnnnnnnnnnnnnnnnnnnnnnnnnnnnnnnnnnnnnnnnnnnnnnnnnnnnnnnnnnnnnnnnnnnnnnnnnnnnnnnnnnnnnnnnnnnnnnnnnnnnnnnnnnnnnnnnnnnnnnnnnnnnnnnnnnnnnnnnnnnnnnnnnnnnnnnnnnnnnnnnnnnnnnnnnnnnnnnnnnnnnnnnnnnnnnnnnnnnnnnnnnnnnnnnnnnnnnnnnnnnnnnnnnnnnnnnnnnnnnnnnnnnnnnnnnnnnnnnnnnnnnnnnnnnnnnnnnnnnnnnnnnnnnnnnnnnnnnnnnnnnnnnnnnnnnnnnnnnnnnnnnnnnnnnnnnnnnnnnnnnnnnnnnnnnnnnnnnnnnnnnnnnnnnnnnnnnnnnnnnnnnnnnnnnnnnnnnnnnnnnnnnnnnnnnnnnnnnnnnnnnnnnnnnnnnnnnnnnnnnnnnnnnnnnnnnnnnnnnnnnnnnnnnnnnnnnnnnnnnnnnnnnnnnnnnnnnnnnnnnnnnnnnnnnnnnnnnnnnnnnnnnnnnnnnnnnnnnnnnnnnnnnnnnnnnnnnnnnnnnnnnnnnnnnnnnnnnnnnnnnnnnnnnnnnnnnnnnnnnnnnnnnnnnnnnnnnnnnnnnnnnnnnnnnnnnnnnnnnnnnnnnnnnnnnnnnnnnnnnnnnnnnnnnnnnnnnnnnnnnnnnnnnnnnnnnnnnnnnnnnnnnnnnnnnnnnnnnnnnnnnnnnnnnnnnnnnnnnnnnnnnnnnnnnnnnnnnnnnnnnnnnnnnnnnnnnnnnnnnnnnnnnnnnnnnnnnnnnnnnnnnnnnnnnnnnnnnnnnnnnnnnnnnnnnnnnnnnnnnnnnnnnnnnnnnnnnnnnnnnnnnnnnnnnnnnnnnnnnnnnnnnnnnnnnnnnnnnnnnnnnnnnnnnnnnnnnnnnnnnnnnnnnnnnnnnnnnnnnnnnnnnnnnnnnnnnnnnnnnnnnnnnnnnnnnnnnnnnnnnnnnnnnnnnnnnnnnnnnnnnnnnnnnnnnnnnnnnnnnnnnnnnnnnnnnnnnnnnnnnnnnnnnnnnnnnnnnnnnnnnnnnnnnnnnnnnnnnnnnnnnnnnnnnnnnnnnnnnnnnnnnnnnnnnnnnnnnnnnnnnnnnnnnnnnnnnnnnnnnnnnnnnnnnnnnnnnnnnnnnnnnnnnnnnnnnnnnnnnnnnnnnnnnnnnnnnnnnnnnnnnnnnnnnnnnnnnnnnnnnnnnnnnnnnnnnnnnnnnnnnnnnnnnnnnnnnnnnnnnnnnnnnnnnnnnnnnnnnnnnnnnnnnnnnnnnnnnnnnnnnnnnnnnnnnnnnnnnnnnnnnnnnnnnnnnnnnnnnnnnnnnnnnnnnnnnnnnnnnnnnnnnnnnnnnnnnnnnnnnnnnnnnnnnnnnnnnnnnnnnnnnnnnnnnnnnnnnnnnnnnnnnnnnnnnnnnnnnnnnnnnnnnnnnnnnnnnnnnnnnnnnnnnnnnnnnnnnnnnnnnnnnnnnnnnnnnnnnnnnnnnnnnnnnnnnnnnnnnnnnnnnnnnnnnnnnnnnnnnnnnnnnnnnnnnnnnnnnnnnnnnnnnnnnnnnnnnnnnnnnnnnnnnnnnnnnnnnnnnnnnnnnnnnnnnnnnnnnnnnnnnnnnnnnnnnnnnnnnnnnnnnnnnnnnnnnnnnnnnnnnnnnnnnnnnnnnnnnnnnnnnnnnnnnnnnnnnnnnnnnnnnnnnnnnnnnnnnnnnnnnnnnnnnnnnnnnnnnnnnnnnnnnnnnnnnnnnnnnnnnnnnnnnnnnnnnnnnnnnnnnnnnnnnnnnnnnnnnnnnnnnnnnnnnnnnnnnnnnnnnnnnnnnnnnnnnnnnnnnnnnnnnnnnnnnnnnnnnnnnnnnnnnnnnnnnnnnnnnnnnnnnnnnnnnnnnnnnnnnnnnnnnnnnnnnnnnnnnnnnnnnnnnnnnnnnnnnnnnnnnnnnnnnnnnnnnnnnnnnnnnnnnnnnnnnnnnnnnnnnnnnnnnnnnnnnnnnnnnnnnnnnnnnnnnnnnnnnnnnnnnnnnnnnnnnnnnnnnnnnnnnnnnnnnnnnnnnnnnnnnnnnnnnnnnnnnnnnnnnnnnnnnnnnnnnnnnnnnnnnnnnnnnnnnnnnnnnnnnnnnnnnnnnnnnnnnnnnnnnnnnnnnnnnnnnnnnnnnnnnnnnnnnnnnnnnnnnnnnnnnnnnnnnnnnnnnnnnnnnnnnnnnnnnnnnnnnnnnnnnnnnnnnnnnnnnnnnnnnnnnnnnnnnnnnnnnnnnnnnnnnnnnnnnnnnnnnnnnnnnnnnnnnnnnnnnnnnnnnnnnnnnnnnnnnnnnnnnnnnnnnnnnnnnnnnnnnnnnnnnnnnnnnnnnnnnnnnnnnnnnnnnnnnnnnnnnnnnnnnnnnnnnnnnnnnnnnnnnnnnnnnnnnnnnnnnnnnnnnnnnnnnnnnnnnnnnnnnnnnnnnnnnnnnnnnnnnnnnnnnnnnnnnnnnnnnnnnnnnnnnnnnnnnnnnnnnnnnnnnnnnnnnnnnnnnnnnnnnnnnnnnnnnnnnnnnnnnnnnnnnnnnnnnnnnnnnnnnnnnnnnnnnnnnnnnnnnnnnnnnnnnnnnnnnnnnnnnnnnnnnnnnnnnnnnnnnnnnnnnnnnnnnnnnnnnnnnnnnnnnnnnnnnnnnnnnnnnnnnnnnnnnnnnnnnnnnnnnnnnnnnnnnnnnnnnnnnnnnnnnnnnnnnnnnnnnnnnnnnnnnnnnnnnnnnnnnnnnnnnnnnnnnnnnnnnnnnnnnnnnnnnnnnnnnnnnnnnnnnnnnnnnnnnnnnnnnnnnnnnnnnnnnnnnnnnnnnnnnnnnnnnnnnnnnnnnnnnnnnnnnnnnnnnnnnnnnnnnnnnnnnnnnnnnnnnnnnnnnnnnnnnnnnnnnnnnnnnnnnnnnnnnnnnnnnnnnnnnnnnnnnnnnnnnnnnnnnnnnnnnnnnnnnnnnnnnnnnnnnnnnnnnnnnnnnnnnnnnnnnnnnnnnnnnnnnnnnnnnnnnnnnnnnnnnnnnnnnnnnnnnnnnnnnnnnnnnnnnnnnnnnnnnnnnnnnnnnnnnnnnnnnnnnnnnnnnnnnnnnnnnnnnnnnnnnnnnnnnnnnnnnnnnnnnnnnnnnnnnnnnnnnnnnnnnnnnnnnnnnnnnnnnnnnnnnnnnnnnnnnnnnnnnnnnnnnnnnnnnnnnnnnnnnnnnnnnnnnnnnnnnnnnnnnnnnnnnnnnnnnnnnnnnnnnnnnnnnnnnnnnnnnnnnnnnnnnnnnnnnnnnnnnnnnnnnnnnnnnnnnnnnnnnnnnnnnnnnnnnnnnnnnnnnnnnnnnnnnnnnnnnnnnnnnnnnnnnnnnnnnnnnnnnnnnnnnnnnnnnnnnnnnnnnnnnnnnnnnnnnnnnnnnnnnnnnnnnnnnnnnnnnnnnnnnnnnnnnnnnnnnnnnnnnnnnnnnnnnnnnnnnnnnnnnnnnnnnnnnnnnnnnnnnnnnnnnnnnnnnnnnnnnnnnnnnnnnnnnnnnnnnnnnnnnnnnnnnnnnnnnnnnnnnnnnnnnnnnnnnnnnnnnnnnnnnnnnnnnnnnnnnnnnnnnnnnnnnnnnnnnnnnnnnnnnnnnnnnnnnnnnnnnnnnnnnnnnnnnnnnnnnnnnnnnnnnnnnnnnnnnnnnnnnnnnnnnnnnnnnnnnnnnnnnnnnnnnnnnnnnnnnnnnnnnnnnnnnnnnnnnnnnnnnnnnnnnnnnnnnnnnnnnnnnnnnnnnnnnnnnnnnnnnnnnnnnnnnnnnnnnnnnnnnnnnnnnnnnnnnnnnnnnnnnnnnnnnnnnnnnnnnnnnnnnnnnnnnnnnnnnnnnnnnnnnnnnnnnnnnnnnnnnnnnnnnnnnnnnnnnnnnnnnnnnnnnnnnnnnnnnnnnnnnnnnnnnnnnnnnnnnnnnnnnnnnnnnnnnnnnnnnnnnnnnnnnnnnnnnnnnnnnnnnnnnnnnnnnnnnnnnnnnnnnnnnnnnnnnnnnnnnnnnnnnnnnnnnnnnnnnnnnnnnnnnnnnnnnnnnnnnnnnnnnnnnnnnnnnnnnnnnnnnnnnnnnnnnnnnnnnnnnnnnnnnnnnnnnnnnnnnnnnnnnnnnnnnnnnnnnnnnnnnnnnnnnnnnnnnnnnnnnnnnnnnnnnnnnnnnnnnnnnnnnnnnnnnnnnnnnnnnnnnnnnnnnnnnnnnnnnnnnnnnnnnnnnnnnnnnnnnnnnnnnnnnnnnnnnnnnnnnnnnnnnnnnnnnnnnnnnnnnnnnnnnnnnnnnnnnnnnnnnnnnnnnnnnnnnnnnnnnnnnnnnnnnnnnnnnnnnnnnnnnnnnnnnnnnnnnnnnnnnnnnnnnnnnnnnnnnnnnnnnnnnnnnnnnnnnnnnnnnnnnnnnnnnnnnnnnnnnnnnnnnnnnnnnnnnnnnnnnnnnnnnnnnnnnnnnnnnnnnnnnnnnnnnnnnnnnnnnnnnnnnnnnnnnnnnnnnnnnnnnnnnnnnnnnnnnnnnnnnnnnnnnnnnnnnnnnnnnnnnnnnnnnnnnnnnnnnnnnnnnnnnnnnnnnnnnnnnnnnnnnnnnnnnnnnnnnnnnnnnnnnnnnnnnnnnnnnnnnnnnnnnnnnnnnnnnnnnnnnnnnnnnnnnnnnnnnnnnnnnnnnnnnnnnnnnnnnnnnnnnnnnnnnnnnnnnnnnnnnnnnnnnnnnnnnnnnnnnnnnnnnnnnnnnnnnnnnnnnnnnnnnnnnnnnnnnnnnnnnnnnnnnnnnnnnnnnnnnnnnnnnnnnnnnnnnnnnnnnnnnnnnnnnnnnnnnnnnnnnnnnnnnnnnnnnnnnnnnnnnnnnnnnnnnnnnnnnnnnnnnnnnnnnnnnnnnnnnnnnnnnnnnnnnnnnnnnnnnnnnnnnnnnnnnnnnnnnnnnnnnnnnnnnnnnnnnnnnnnnnnnnnnnnnnnnnnnnnnnnnnnnnnnnnnnnnnnnnnnnnnnnnnnnnnnnnnnnnnnnnnnnnnnnnnnnnnnnnnnnnnnnnnnnnnnnnnnnnnnnnnnnnnnnnnnnnnnnnnnnnnnnnnnnnnnnnnnnnnnnnnnnnnnnnnnnnnnnnnnnnnnnnnnnnnnnnnnnnnnnnnnnnnnnnnnnnnnnnnnnnnnnnnnnnnnnnnnnnnnnnnnnnnnnnnnnnnnnnnnnnnnnnnnnnnnnnnnnnnnnnnnnnnnnnnnnnnnnnnnnnnnnnnnnnnnnnnnnnnnnnnnnnnnnnnnnnnnnnnnnnnnnnnnnnnnnnnnnnnnnnnnnnnnnnnnnnnnnnnnnnnnnnnnnnnnnnnnnnnnnnnnnnnnnnnnnnnnnnnnnnnnnnnnnnnnnnnnnnnnnnnnnnnnnnnnnnnnnnnnnnnnnnnnnnnnnnnnnnnnnnnnnnnnnnnnnnnnnnnnnnnnnnnnnnnnnnnnnnnnnnnnnnnnnnnnnnnnnnnnnnnnnnnnnnnnnnnnnnnnnnnnnnnnnnnnnnnnnnnnnnnnnnnnnnnnnnnnnnnnnnnnnnnnnnnnnnnnnnnnnnnnnnnnnnnnnnnnnnnnnnnnnnnnnnnnnnnnnnnnnnnnnnnnnnnnnnnnnnnnnnnnnnnnnnnnnnnnnnnnnnnnnnnnnnnnnnnnnnnnnnnnnnnnnnnnnnnnnnnnnnnnnnnnnnnnnnnnnnnnnnnnnnnnnnnnnnnnnnnnnnnnnnnnnnnnnnnnnnnnnnnnnnnnnnnnnnnnnnnnnnnnnnnnnnnnnnnnnnnnnnnnnnnnnnnnnnnnnnnnnnnnnnnnnnnnnnnnnnnnnnnnnnnnnnnnnnnnnnnnnnnnnnnnnnnnnnnnnnnnnnnnnnnnnnnnnnnnnnnnnnnnnnnnnnnnnnnnnnnnnnnnnnnnnnnnnnnnnnnnnnnnnnnnnnnnnnnnnnnnnnnnnnnnnnnnnnnnnnnnnnnnnnnnnnnnnnnnnnnnnnnnnnnnnnnnnnnnnnnnnnnnnnnnnnnnnnnnnnnnnnnnnnnnnnnnnnnnnnnnnnnnnnnnnnnnnnnnnnnnnnnnnnnnnnnnnnnnnnnnnnnnnnnnnnnnnnnnnnnnnnnnnnnnnnnnnnnnnnnnnnnnnnnnnnnnnnnnnnnnnnnnnnnnnnnnnnnnnnnnnnnnnnnnnnnnnnnnnnnnnnnnnnnnnnnnnnnnnnnnnnnnnnnnnnnnnnnnnnnnnnnnnnnnnnnnnnnnnnnnnnnnnnnnnnnnnnnnnnnnnnnnnnnnnnnnnnnnnnnnnnnnnnnnnnnnnnnnnnnnnnnnnnnnnnnnnnnnnnnnnnnnnnnnnnnnnnnnnnnnnnnnnnnnnnnnnnnnnnnnnnnnnnnnnnnnnnnnnnnnnnnnnnnnnnnnnnnnnnnnnnnnnnnnnnnnnnnnnnnnnnnnnnnnnnnnnnnnnnnnnnnnnnnnnnnnnnnnnnnnnnnnnnnnnnnnnnnnnnnnnnnnnnnnnnnnnnnnnnnnnnnnnnnnnnnnnnnnnnnnnnnnnnnnnnnnnnnnnnnnnnnnnnnnnnnnnnnnnnnnnnnnnnnnnnnnnnnnnnnnnnnnnnnnnnnnnnnnnnnnnnnnnnnnnnnnnnnnnnnnnnnnnnnnnnnnnnnnnnnnnnnnnnnnnnnnnnnnnnnnnnnnnnnnnnnnnnnnnnnnnnnnnnnnnnnnnnnnnnnnnnnnnnnnnnnnnnnnnnnnnnnnnnnnnnnnnnnnnnnnnnnnnnnnnnnnnnnnnnnnnnnnnnnnnnnnnnnnnnnnnnnnnnnnnnnnnnnnnnnnnnnnnnnnnnnnnnnnnnnnnnnnnnnnnnnnnnnnnnnnnnnnnnnnnnnnnnnnnnnnnnnnnnnnnnnnnnnnnnnnnnnnnnnnnnnnnnnnnnnnnnnnnnnnnnnnnnnnnnnnnnnnnnnnnnnnnnnnnnnnnnnnnnnnnnnnnnnnnnnnnnnnnnnnnnnnnnnnnnnnnnnnnnnnnnnnnnnnnnnnnnnnnnnnnnnnnnnnnnnnnnnnnnnnnnnnnnnnnnnnnnnnnnnnnnnnnnnnnnnnnnnnnnnnnnnnnnnnnnnnnnnnnnnnnnnnnnnnnnnnnnnnnnnnnnnnnnnnnnnnnnnnnnnnnnnnnnnnnnnnnnnnnnnnnnnnnnnnnnnnnnnnnnnnnnnnnnnnnnnnnnnnnnnnnnnnnnnnnnnnnnnnnnnnnnnnnnnnnnnnnnnnnnnnnnnnnnnnnnnnnnnnnnnnnnnnnnnnnnnnnnnnnnnnnnnnnnnnnnnnnnnnnnnnnnnnnnnnnnnnnnnnnnnnnnnnnnnnnnnnnnnnnnnnnnnnnnnnnnnnnnnnnnnnnnnnnnnnnnnnnnnnnnnnnnnnnnnnnnnnnnnnnnnnnnnnnnnnnnnnnnnnnnnnnnnnnnnnnnnnnnnnnnnnnnnnnnnnnnnnnnnnnnnnnnnnnnnnnnnnnnnnnnnnnnnnnnnnnnnnnnnnnnnnnnnnnnnnnnnnnnnnnnnnnnnnnnnnnnnnnnnnnnnnnnnnnnnnnnnnnnnnnnnnnnnnnnnnnnnnnnnnnnnnnnnnnnnnnnnnnnnnnnnnnnnnnnnnnnnnnnnnnnnnnnnnnnnnnnnnnnnnnnnnnnnnnnnnnnnnnnnnnnnnnnnnnnnnnnnnnnnnnnnnnnnnnnnnnnnnnnnnnnnnnnnnnnnnnnnnnnnnnnnnnnnnnnnnnnnnnnnnnnnnnnnnnnnnnnnnnnnnnnnnnnnnnnnnnnnnnnnnnnnnnnnnnnnnnnnnnnnnnnnnnnnnnnnnnnnnnnnnnnnnnnnnnnnnnnnnnnnnnnnnnnnnnnnnnnnnnnnnnnnnnnnnnnnnnnnnnnnnnnnnnnnnnnnnnnnnnnnnnnnnnnnnnnnnnnnnnnnnnnnnnnnnnnnnnnnnnnnnnnnnnnnnnnnnnnnnnnnnnnnnnnnnnnnnnnnnnnnnnnnnnnnnnnnnnnnnnnnnnnnnnnnnnnnnnnnnnnnnnnnnnnnnnnnnnnnnnnnnnnnnnnnnnnnnnnnnnnnnnnnnnnnnnnnnnnnnnnnnnnnnnnnnnnnnnnnnnnnnnnnnnnnnnnnnnnnnnnnnnnnnnnnnnnnnnnnnnnnnnnnnnnnnnnnnnnnnnnnnnnnnnnnnnnnnnnnnnnnnnnnnnnnnnnnnnnnnnnnnnnnnnnnnnnnnnnnnnnnnnnnnnnnnnnnnnnnnnnnnnnnnnnnnnnnnnnnnnnnnnnnnnnnnnnnnnnnnnnnnnnnnnnnnnnnnnnnnnnnnnnnnnnnnnnnnnnnnnnnnnnnnnnnnnnnnnnnnnnnnnnnnnnnnnnnnnnnnnnnnnnnnnnnnnnnnnnnnnnnnnnnnnnnnnnnnnnnnnnnnnnnnnnnnnnnnnnnnnnnnnnnnnnnnnnnnnnnnnnnnnnnnnnnnnnnnnnnnnnnnnnnnnnnnnnnnnnnnnnnnnnnnnnnnnnnnnnnnnnnnnnnnnnnnnnnnnnnnnnnnnnnnnnnnnnnnnnnnnnnnnnnnnnnnnnnnnnnnnnnnnnnnnnnnnnnnnnnnnnnnnnnnnnnnnnnnnnnnnnnnnnnnnnnnnnnnnnnnnnnnnnnnnnnnnnnnnnnnnnnnnnnnnnnnnnnnnnnnnnnnnnnnnnnnnnnnnnnnnnnnnnnnnnnnnnnnnnnnnnnnnnnnnnnnnnnnnnnnnnnnnnnnnnnnnnnnnnnnnnnnnnnnnnnnnnnnnnnnnnnnnnnnnnnnnnnnnnnnnnnnnnnnnnnnnnnnnnnnnnnnnnnnnnnnnnnnnnnnnnnnnnnnnnnnnnnnnnnnnnnnnnnnnnnnnnnnnnnnnnnnnnnnnnnnnnnnnnnnnnnnnnnnnnnnnnnnnnnnnnnnnnnnnnnnnnnnnnnnnnnnnnnnnnnnnnnnnnnnnnnnnnnnnnnnnnnnnnnnnnnnnnnnnnnnnnnnnnnnnnnnnnnnnnnnnnnnnnnnnnnnnnnnnnnnnnnnnnnnnnnnnnnnnnnnnnnnnnnnnnnnnnnnnnnnnnnnnnnnnnnnnnnnnnnnnnnnnnnnnnnnnnnnnnnnnnnnnnnnnnnnnnnnnnnnnnnnnnnnnnnnnnnnnnnnnnnnnnnnnnnnnnnnnnnnnnnnnnnnnnnnnnnnnnnnnnnnnnnnnnnnnnnnnnnnnnnnnnnnnnnnnnnnnnnnnnnnnnnnnnnnnnnnnnnnnnnnnnnnnnnnnnnnnnnnnnnnnnnnnnnnnnnnnnnnnnnnnnnnnnnnnnnnnnnnnnnnnnnnnnnnnnnnnnnnnnnnnnnnnnnnnnnnnnnnnnnnnnnnnnnnnnnnnnnnnnnnnnnnnnnnnnnnnnnnnnnnnnnnnnnnnnnnnnnnnnnnnnnnnnnnnnnnnnnnnnnnnnnnnnnnnnnnnnnnnnnnnnnnnnnnnnnnnnnnnnnnnnnnnnnnnnnnnnnnnnnnnnnnnnnnnnnnnnnnnnnnnnnnnnnnnnnnnnnnnnnnnnnnnnnnnnnnnnnnnnnnnnnnnnnnnnnnnnnnnnnnnnnnnnnnnnnnnnnnnnnnnnnnnnnnnnnnnnnnnnnnnnnnnnnnnnnnnnnnnnnnnnnnnnnnnnnnnnnnnnnnnnnnnnnnnnnnnnnnnnnnnnnnnnnnnnnnnnnnnnnnnnnnnnnnnnnnnnnnnnnnnnnnnnnnnnnnnnnnnnnnnnnnnnnnnnnnnnnnnnnnnnnnnnnnnnnnnnnnnnnnnnnnnnnnnnnnnnnnnnnnnnnnnnnnnnnnnnnnnnnnnnnnnnnnnnnnnnnnnnnnnnnnnnnnnnnnnnnnnnnnnnnnnnnnnnnnnnnnnnnnnnnnnnnnnnnnnnnnnnnnnnnnnnnnnnnnnnnnnnnnnnnnnnnnnnnnnnnnnnnnnnnnnnnnnnnnnnnnnnnnnnnnnnnnnnnnnnnnnnnnnnnnnnnnnnnnnnnnnnnnnnnnnnnnnnnnnnnnnnnnnnnnnnnnnnnnnnnnnnnnnnnnnnnnnnnnnnnnnnnnnnnnnnnnnnnnnnnnnnnnnnnnnnnnnnnnnnnnnnnnnnnnnnnnnnnnnnnnnnnnnnnnnnnnnnnnnnnnnnnnnnnnnnnnnnnnnnnnnnnnnnnnnnnnnnnnnnnnnnnnnnnnnnnnnnnnnnnnnnnnnnnnnnnnnnnnnnnnnnnnnnnnnnnnnnnnnnnnnnnnnnnnnnnnnnnnnnnnnnnnnnnnnnnnnnnnnnnnnnnnnnnnnnnnnnnnnnnnnnnnnnnnnnnnnnnnnnnnnnnnnnnnnnnnnnnnnnnnnnnnnnnnnnnnnnnnnnnnnnnnnnnnnnnnnnnnnnnnnnnnnnnnnnnnnnnnnnnnnnnnnnnnnnnnnnnnnnnnnnnnnnnnnnnnnnnnnnnnnnnnnnnnnnnnnnnnnnnnnnnnnnnnnnnnnnnnnnnnnnnnnnnnnnnnnnnnnnnnnnnnnnnnnnnnnnnnnnnnnnnnnnnnnnnnnnnnnnnnnnnnnnnnnnnnnnnnnnnnnnnnnnnnnnnnnnnnnnnnnnnnnnnnnnnnnnnnnnnnnnnnnnnnnnnnnnnnnnnnnnnnnnnnnnnnnnnnnnnnnnnnnnnnnnnnnnnnnnnnnnnnnnnnnnnnnnnnnnnnnnnnnnnnnnnnnnnnnnnnnnnnnnnnnnnnnnnnnnnnnnnnnnnnnnnnnnnnnnnnnnnnnnnnnnnnnnnnnnnnnnnnnnnnnnnnnnnnnnnnnnnnnnnnnnnnnnnnnnnnnnnnnnnnnnnnnnnnnnnnnnnnnnnnnnnnnnnnnnnnnnnnnnnnnnnnnnnnnnnnnnnnnnnnnnnnnnnnnnnnnnnnnnnnnnnnnnnnnnnnnnnnnnnnnnnnnnnnnnnnnnnnnnnnnnnnnnnnnnnnnnnnnnnnnnnnnnnnnnnnnnnnnnnnnnnnnnnnnnnnnnnnnnnnnnnnnnnnnnnnnnnnnnnnnnnnnnnnnnnnnnnnnnnnnnnnnnnnnnnnnnnnnnnnnnnnnnnnnnnnnnnnnnnnnnnnnnnnnnnnnnnnnnnnnnnnnnnnnnnnnnnnnnnnnnnnnnnnnnnnnnnnnnnnnnnnnnnnnnnnnnnnnnnnnnnnnnnnnnnnnnnnnnnnnnnnnnnnnnnnnnnnnnnnnnnnnnnnnnnnnnnnnnnnnnnnnnnnnnnnnnnnnnnnnnnnnnnnnnnnnnnnnnnnnnnnnnnnnnnnnnnnnnnnnnnnnnnnnnnnnnnnnnnnnnnnnnnnnnnnnnnnnnnnnnnnnnnnnnnnnnnnnnnnnnnnnnnnnnnnnnnnnnnnnnnnnnnnnnnnnnnnnnnnnnnnnnnnnnnnnnnnnnnnnnnnnnnnnnnnnnnnnnnnnnnnnnnnnnnnnnnnnnnnnnnnnnnnnnnnnnnnnnnnnnnnnnnnnnnnnnnnnnnnnnnnnnnnnnnnnnnnnnnnnnnnnnnnnnnnnnnnnnnnnnnnnnnnnnnnnnnnnnnnnnnnnnnnnnnnnnnnnnnnnnnnnnnnnnnnnnnnnnnnnnnnnnnnnnnnnnnnnnnnnnnnnnnnnnnnnnnnnnnnnnnnnnnnnnnnnnnnnnnnnnnnnnnnnnnnnnnnnnnnnnnnnnnnnnnnnnnnnnnnnnnnnnnnnnnnnnnnnnnnnnnnnnnnnnnnnnnnnnnnnnnnnnnnnnnnnnnnnnnnnnnnnnnnnnnnnnnnnnnnnnnnnnnnnnnnnnnnnnnnnnnnnnnnnnnnnnnnnnnnnnnnnnnnnnnnnnnnnnnnnnnnnnnnnnnnnnnnnnnnnnnnnnnnnnnnnnnnnnnnnnnnnnnnnnnnnnnnnnnnnnnnnnnnnnnnnnnnnnnnnnnnnnnnnnnnnnnnnnnnnnnnnnnnnnnnnnnnnnnnnnnnnnnnnnnnnnnnnnnnnnnnnnnnnnnnnnnnnnnnnnnnnnnnnnnnnnnnnnnnnnnnnnnnnnnnnnnnnnnnnnnnnnnnnnnnnnnnnnnnnnnnnnnnnnnnnnnnnnnnnnnnnnnnnnnnnnnnnnnnnnnnnnnnnnnnnnnnnnnnnnnnnnnnnnnnnnnnnnnnnnnnnnnnnnnnnnnnnnnnnnnnnnnnnnnnnnnnnnnnnnnnnnnnnnnnnnnnnnnnnnnnnnnnnnnnnnnnnnnnnnnnnnnnnnnnnnnnnnnnnnnnnnnnnnnnnnnnnnnnnnnnnnnnnnnnnnnnnnnnnnnnnnnnnnnnnnnnnnnnnnnnnnnnnnnnnnnnnnnnnnnnnnnnnnnnnnnnnnnnnnnnnnnnnnnnnnnnnnnnnnnnnnnnnnnnnnnnnnnnnnnnnnnnnnnnnnnnnnnnnnnnnnnnnnnnnnnnnnnnnnnnnnnnnnnnnnnnnnnnnnnnnnnnnnnnnnnnnnnnnnnnnnnnnnnnnnnnnnnnnnnnnnnnnnnnnnnnnnnnnnnnnnnnnnnnnnnnnnnnnnnnnnnnnnnnnnnnnnnnnnnnnnnnnnnnnnnnnnnnnnnnnnnnnnnnnnnnnnnnnnnnnnnnnnnnnnnnnnnnnnnnnnnnnnnnnnnnnnnnnnnnnnnnnnnnnnnnnnnnnnnnnnnnnnnnnnnnnnnnnnnnnnnnnnnnnnnnnnnnnnnnnnnnnnnnnnnnnnnnnnnnnnnnnnnnnnnnnnnnnnnnnnnnnnnnnnnnnnnnnnnnnnnnnnnnnnnnnnnnnnnnnnnnnnnnnnnnnnnnnnnnnnnnnnnnnnnnnnnnnnnnnnnnnnnnnnnnnnnnnnnnnnnnnnnnnnnnnnnnnnnnnnnnnnnnnnnnnnnnnnnnnnnnnnnnnnnnnnnnnnnnnnnnnnnnnnnnnnnnnnnnnnnnnnnnnnnnnnnnnnnnnnnnnnnnnnnnnnnnnnnnnnnnnnnnnnnnnnnnnnnnnnnnnnnnnnnnnnnnnnnnnnnnnnnnnnnnnnnnnnnnnnnnnnnnnnnnnnnnnnnnnnnnnnnnnnnnnnnnnnnnnnnnnnnnnnnnnnnnnnnnnnnnnnnnnnnnnnnnnnnnnnnnnnnnnnnnnnnnnnnnnnnnnnnnnnnnnnnnnnnnnnnnnnnnnnnnnnnnnnnnnnnnnnnnnnnnnnnnnnnnnnnnnnnnnnnnnnnnnnnnnnnnnnnnnnnnnnnnnnnnnnnnnnnnnnnnnnnnnnnnnnnnnnnnnnnnnnnnnnnnnnnnnnnnnnnnnnnnnnnnnnnnnnnnnnnnnnnnnnnnnnnnnnnnnnnnnnnnnnnnnnnnnnnnnnnnnnnnnnnnnnnnnnnnnnnnnnnnnnnnnnnnnnnnnnnnnnnnnnnnnnnnnnnnnnnnnnnnnnnnnnnnnnnnnnnnnnnnnnnnnnnnnnnnnnnnnnnnnnnnnnnnnnnnnnnnnnnnnnnnnnnnnnnnnnnnnnnnnnnnnnnnnnnnnnnnnnnnnnnnnnnnnnnnnnnnnnnnnnnnnnnnnnnnnnnnnnnnnnnnnnnnnnnnnnnnnnnnnnnnnnnnnnnnnnnnnnnnnnnnnnnnnnnnnnnnnnnnnnnnnnnnnnnnnnnnnnnnnnnnnnnnnnnnnnnnnnnnnnnnnnnnnnnnnnnnnnnnnnnnnnnnnnnnnnnnnnnnnnnnnnnnnnnnnnnnnnnnnnnnnnnnnnnnnnnnnnnnnnnnnnnnnnnnnnnnnnnnnnnnnnnnnnnnnnnnnnnnnnnnnnnnnnnnnnnnnnnnnnnnnnnnnnnnnnnnnnnnnnnnnnnnnnnnnnnnnnnnnnnnnnnnnnnnnnnnnnnnnnnnnnnnnnnnnnnnnnnnnnnnnnnnnnnnnnnnnnnnnnnnnnnnnnnnnnnnnnnnnnnnnnnnnnnnnnnnnnnnnnnnnnnnnnnnnnnnnnnnnnnnnnnnnnnnnnnnnnnnnnnnnnnnnnnnnnnnnnnnnnnnnnnnnnnnnnnnnnnnnnnnnnnnnnnnnnnnnnnnnnnnnnnnnnnnnnnnnnnnnnnnnnnnnnnnnnnnnnnnnnnnnnnnnnnnnnnnnnnnnnnnnnnnnnnnnnnnnnnnnnnnnnnnnnnnnnnnnnnnnnnnnnnnnnnnnnnnnnnnnnnnnnnnnnnnnnnnnnnnnnnnnnnnnnnnnnnnnnnnnnnnnnnnnnnnnnnnnnnnnnnnnnnnnnnnnnnnnnnnnnnnnnnnnnnnnnnnnnnnnnnnnnnnnnnnnnnnnnnnnnnnnnnnnnnnnnnnnnnnnnnnnnnnnnnnnnnnnnnnnnnnnnnnnnnnnnnnnnnnnnnnnnnnnnnnnnnnnnnnnnnnnnnnnnnnnnnnnnnnnnnnnnnnnnnnnnnnnnnnnnnnnnnnnnnnnnnnnnnnnnnnnnnnnnnnnnnnnnnnnnnnnnnnnnnnnnnnnnnnnnnnnnnnnnnnnnnnnnnnnnnnnnnnnnnnnnnnnnnnnnnnnnnnnnnnnnnnnnnnnnnnnnnnnnnnnnnnnnnnnnnnnnnnnnnnnnnnnnnnnnnnnnnnnnnnnnnnnnnnnnnnnnnnnnnnnnnnnnnnnnnnnnnnnnnnnnnnnnnnnnnnnnnnnnnnnnnnnnnnnnnnnnnnnnnnnnnnnnnnnnnnnnnnnnnnnnnnnnnnnnnnnnnnnnnnnnnnnnnnnnnnnnnnnnnnnnnnnnnnnnnnnnnnnnnnnnnnnnnnnnnnnnnnnnnnnnnnnnnnnnnnnnnnnnnnnnnnnnnnnnnnnnnnnnnnnnnnnnnnnnnnnnnnnnnnnnnnnnnnnnnnnnnnnnnnnnnnnnnnnnnnnnnnnnnnnnnnnnnnnnnnnnnnnnnnnnnnnnnnnnnnnnnnnnnnnnnnnnnnnnnnnnnnnnnnnnnnnnnnnnnnnnnnnnnnnnnnnnnnnnnnnnnnnnnnnnnnnnnnnnnnnnnnnnnnnnnnnnnnnnnnnnnnnnnnnnnnnnnnnnnnnnnnnnnnnnnnnnnnnnnnnnnnnnnnnnnnnnnnnnnnnnnnnnnnnnnnnnnnnnnnnnnnnnnnnnnnnnnnnnnnnnnnnnnnnnnnnnnnnnnnnnnnnnnnnnnnnnnnnnnnnnnnnnnnnnnnnnnnnnnnnnnnnnnnnnnnnnnnnnnnnnnnnnnnnnnnnnnnnnnnnnnnnnnnnnnnnnnnnnnnnnnnnnnnnnnnnnnnnnnnnnnnnnnnnnnnnnnnnnnnnnnnnnnnnnnnnnnnnnnnnnnnnnnnnnnnnnnnnnnnnnnnnnnnnnnnnnnnnnnnnnnnnnnnnnnnnnnnnnnnnnnnnnnnnnnnnnnnnnnnnnnnnnnnnnnnnnnnnnnnnnnnnnnnnnnnnnnnnnnnnnnnnnnnnnnnnnnnnnnnnnnnnnnnnnnnnnnnnnnnnnnnnnnnnnnnnnnnnnnnnnnnnnnnnnnnnnnnnnnnnnnnnnnnnnnnnnnnnnnnnnnnnnnnnnnnnnnnnnnnnnnnnnnnnnnnnnnnnnnnnnnnnnnnnnnnnnnnnnnnnnnnnnnnnnnnnnnnnnnnnnnnnnnnnnnnnnnnnnnnnnnnnnnnnnnnnnnnnnnnnnnnnnnnnnnnnnnnnnnnnnnnnnnnnnnnnnnnnnnnnnnnnnnnnnnnnnnnnnnnnnnnnnnnnnnnnnnnnnnnnnnnnnnnnnnnnnnnnnnnnnnnnnnnnnnnnnnnnnnnnnnnnnnnnnnnnnnnnnnnnnnnnnnnnnnnnnnnnnnnnnnnnnnnnnnnnnnnnnnnnnnnnnnnnnnnnnnnnnnnnnnnnnnnnnnnnnnnnnnnnnnnnnnnnnnnnnnnnnnnnnnnnnnnnnnnnnnnnnnnnnnnnnnnnnnnnnnnnnnnnnnnnnnnnnnnnnnnnnnnnnnnnnnnnnnnnnnnnnnnnnnnnnnnnnnnnnnnnnnnnnnnnnnnnnnnnnnnnnnnnnnnnnnnnnnnnnnnnnnnnnnnnnnnnnnnnnnnnnnnnnnnnnnnnnnnnnnnnnnnnnnnnnnnnnnnnnnnnnnnnnnnnnnnnnnnnnnnnnnnnnnnnnnnnnnnnnnnnnnnnnnnnnnnnnnnnnnnnnnnnnnnnnnnnnnnnnnnnnnnnnnnnnnnnnnnnnnnnnnnnnnnnnnnnnnnnnnnnnnnnnnnnnnnnnnnnnnnnnnnnnnnnnnnnnnnnnnnnnnnnnnnnnnnnnnnnnnnnnnnnnnnnnnnnnnnnnnnnnnnnnnnnnnnnnnnnnnnnnnnnnnnnnnnnnnnnnnnnnnnnnnnnnnnnnnnnnnnnnnnnnnnnnnnnnnnnnnnnnnnnnnnnnnnnnnnnnnnnnnnnnnnnnnnnnnnnnnnnnnnnnnnnnnnnnnnnnnnnnnnnnnnnnnnnnnnnnnnnnnnnnnnnnnnnnnnnnnnnnnnnnnnnnnnnnnnnnnnnnnnnnnnnnnnnnnnnnnnnnnnnnnnnnnnnnnnnnnnnnnnnnnnnnnnnnnnnnnnnnnnnnnnnnnnnnnnnnnnnnnnnnnnnnnnnnnnnnnnnnnnnnnnnnnnnnnnnnnnnnnnnnnnnnnnnnnnnnnnnnnnnnnnnnnnnnnnnnnnnnnnnnnnnnnnnnnnnnnnnnnnnnnnnnnnnnnnnnnnnnnnnnnnnnnnnnnnnnnnnnnnnnnnnnnnnnnnnnnnnnnnnnnnnnnnnnnnnnnnnnnnnnnnnnnnnnnnnnnnnnnnnnnnnnnnnnnnnnnnnnnnnnnnnnnnnnnnnnnnnnnnnnnnnnnnnnnnnnnnnnnnnnnnnnnnnnnnnnnnnnnnnnnnnnnnnnnnnnnnnnnnnnnnnnnnnnnnnnnnnnnnnnnnnnnnnnnnnnnnnnnnnnnnnnnnnnnnnnnnnnnnnnnnnnnnnnnnnnnnnnnnnnnnnnnnnnnnnnnnnnnnnnnnnnnnnnnnnnnnnnnnnnnnnnnnnnnnnnnnnnnnnnnnnnnnnnnnnnnnnnnnnnnnnnnnnnnnnnnnnnnnnnnnnnnnnnnnnnnnnnnnnnnnnnnnnnnnnnnnnnnnnnnnnnnnnnnnnnnnnnnnnnnnnnnnnnnnnnnnnnnnnnnnnnnnnnnnnnnnnnnnnnnnnnnnnnnnnnnnnnnnnnnnnnnnnnnnnnnnnnnnnnnnnnnnnnnnnnnnnnnnnnnnnnnnnnnnnnnnnnnnnnnnnnnnnnnnnnnnnnnnnnnnnnnnnnnnnnnnnnnnnnnnnnnnnnnnnnnnnnnnnnnnnnnnnnnnnnnnnnnnnnnnnnnnnnnnnnnnnnnnnnnnnnnnnnnnnnnnnnnnnnnnnnnnnnnnnnnnnnnnnnnnnnnnnnnnnnnnnnnnnnnnnnnnnnnnnnnnnnnnnnnnnnnnnnnnnnnnnnnnnnnnnnnnnnnnnnnnnnnnnnnnnnnnnnnnnnnnnnnnnnnnnnnnnnnnnnnnnnnnnnnnnnnnnnnnnnnnnnnnnnnnnnnnnnnnnnnnnnnnnnnnnnnnnnnnnnnnnnnnnnnnnnnnnnnnnnnnnnnnnnnnnnnnnnnnnnnnnnnnnnnnnnnnnnnnnnnnnnnnnnnnnnnnnnnnnnnnnnnnnnnnnnnnnnnnnnnnnnnnnnnnnnnnnnnnnnnnnnnnnnnnnnnnnnnnnnnnnnnnnnnnnnnnnnnnnnnnnnnnnnnnnnnnnnnnnnnnnnnnnnnnnnnnnnnnnnnnnnnnnnnnnnnnnnnnnnnnnnnnnnnnnnnnnnnnnnnnnnnnnnnnnnnnnnnnnnnnnnnnnnnnnnnnnnnnnnnnnnnnnnnnnnnnnnnnnnnnnnnnnnnnnnnnnnnnnnnnnnnnnnnnnnnnnnnnnnnnnnnnnnnnnnnnnnnnnnnnnnnnnnnnnnnnnnnnnnnnnnnnnnnnnnnnnnnnnnnnnnnnnnnnnnnnnnnnnnnnnnnnnnnnnnnnnnnnnnnnnnnnnnnnnnnnnnnnnnnnnnnnnnnnnnnnnnnnnnnnnnnnnnnnnnnnnnnnnnnnnnnnnnnnnnnnnnnnnnnnnnnnnnnnnnnnnnnnnnnnnnnnnnnnnnnnnnnnnnnnnnnnnnnnnnnnnnnnnnnnnnnnnnnnnnnnnnnnnnnnnnnnnnnnnnnnnnnnnnnnnnnnnnnnnnnnnnnnnnnnnnnnnnnnnnnnnnnnnnnnnnnnnnnnnnnnnnnnnnnnnnnnnnnnnnnnnnnnnnnnnnnnnnnnnnnnnnnnnnnnnnnnnnnnnnnnnnnnnnnnnnnnnnnnnnnnnnnnnnnnnnnnnnnnnnnnnnnnnnnnnnnnnnnnnnnnnnnnnnnnnnnnnnnnnnnnnnnnnnnnnnnnnnnnnnnnnnnnnnnnnnnnnnnnnnnnnnnnnnnnnnnnnnnnnnnnnnnnnnnnnnnnnnnnnnnnnnnnnnnnnnnnnnnnnnnnnnnnnnnnnnnnnnnnnnnnnnnnnnnnnnnnnnnnnnnnnnnnnnnnnnnnnnnnnnnnnnnnnnnnnnnnnnnnnnnnnnnnnnnnnnnnnnnnnnnnnnnnnnnnnnnnnnnnnnnnnnnnnnnnnnnnnnnnnnnnnnnnnnnnnnnnnnnnnnnnnnnnnnnnnnnnnnnnnnnnnnnnnnnnnnnnnnnnnnnnnnnnnnnnnnnnnnnnnnnnnnnnnnnnnnnnnnnnnnnnnnnnnnnnnnnnnnnnnnnnnnnnnnnnnnnnnnnnnnnnnnnnnnnnnnnnnnnnnnnnnnnnnnnnnnnnnnnnnnnnnnnnnnnnnnnnnnnnnnnnnnnnnnnnnnnnnnnnnnnnnnnnnnnnnnnnnnnnnnnnnnnnnnnnnnnnnnnnnnnnnnnnnnnnnnnnnnnnnnnnnnnnnnnnnnnnnnnnnnnnnnnnnnnnnnnnnnnnnnnnnnnnnnnnnnnnnnnnnnnnnnnnnnnnnnnnnnnnnnnnnnnnnnnnnnnnnnnnnnnnnnnnnnnnnnnnnnnnnnnnnnnnnnnnnnnnnnnnnnnnnnnnnnnnnnnnnnnnnnnnnnnnnnnnnnnnnnnnnnnnnnnnnnnnnnnnnnnnnnnnnnnnnnnnnnnnnnnnnnnnnnnnnnnnnnnnnnnnnnnnnnnnnnnnnnnnnnnnnnnnnnnnnnnnnnnnnnnnnnnnnnnnnnnnnnnnnnnnnnnnnnnnnnnnnnnnnnnnnnnnnnnnnnnnnnnnnnnnnnnnnnnnnnnnnnnnnnnnnnnnnnnnnnnnnnnnnnnnnnnnnnnnnnnnnnnnnnnnnnnnnnnnnnnnnnnnnnnnnnnnnnnnnnnnnnnnnnnnnnnnnnnnnnnnnnnnnnnnnnnnnnnnnnnnnnnnnnnnnnnnnnnnnnnnnnnnnnnnnnnnnnnnnnnnnnnnnnnnnnnnnnnnnnnnnnnnnnnnnnnnnnnnnnnnnnnnnnnnnnnnnnnnnnnnnnnnnnnnnnnnnnnnnnnnnnnnnnnnnnnnnnnnnnnnnnnnnnnnnnnnnnnnnnnnnnnnnnnnnnnnnnnnnnnnnnnnnnnnnnnnnnnnnnnnnnnnnnnnnnnnnnnnnnnnnnnnnnnnnnnnnnnnnnnnnnnnnnnnnnnnnnnnnnnnnnnnnnnnnnnnnnnnnnnnnnnnnnnnnnnnnnnnnnnnnnnnnnnnnnnnnnnnnnnnnnnnnnnnnnnnnnnnnnnnnnnnnnnnnnnnnnnnnnnnnnnnnnnnnnnnnnnnnnnnnnnnnnnnnnnnnnnnnnnnnnnnnnnnnnnnnnnnnnnnnnnnnnnnnnnnnnnnnnnnnnnnnnnnnnnnnnnnnnnnnnnnnnnnnnnnnnnnnnnnnnnnnnnnnnnnnnnnnnnnnnnnnnnnnnnnnnnnnnnnnnnnnnnnnnnnnnnnnnnnnnnnnnnnnnnnnnnnnnnnnnnnnnnnnnnnnnnnnnnnnnnnnnnnnnnnnnnnnnnnnnnnnnnnnnnnnnnnnnnnnnnnnnnnnnnnnnnnnnnnnnnnnnnnnnnnnnnnnnnnnnnnnnnnnnnnnnnnnnnnnnnnnnnnnnnnnnnnnnnnnnnnnnnnnnnnnnnnnnnnnnnnnnnnnnnnnnnnnnnnnnnnnnnnnnnnnnnnnnnnnnnnnnnnnnnnnnnnnnnnnnnnnnnnnnnnnnnnnnnnnnnnnnnnnnnnnnnnnnnnnnnnnnnnnnnnnnnnnnnnnnnnnnnnnnnnnnnnnnnnnnnnnnnnnnnnnnnnnnnnnnnnnnnnnnnnnnnnnnnnnnnnnnnnnnnnnnnnnnnnnnnnnnnnnnnnnnnnnnnnnnnnnnnnnnnnnnnnnnnnnnnnnnnnnnnnnnnnnnnnnnnnnnnnnnnnnnnnnnnnnnnnnnnnnnnnnnnnnnnnnnnnnnnnnnnnnnnnnnnnnnnnnnnnnnnnnnnnnnnnnnnnnnnnnnnnnnnnnnnnnnnnnnnnnnnnnnnnnnnnnnnnnnnnnnnnnnnnnnnnnnnnnnnnnnnnnnnnnnnnnnnnnnnnnnnnnnnnnnnnnnnnnnnnnnnnnnnnnnnnnnnnnnnnnnnnnnnnnnnnnnnnnnnnnnnnnnnnnnnnnnnnnnnnnnnnnnnnnnnnnnnnnnnnnnnnnnnnnnnnnnnnnnnnnnnnnnnnnnnnnnnnnnnnnnnnnnnnnnnnnnnnnnnnnnnnnnnnnnnnnnnnnnnnnnnnnnnnnnnnnnnnnnnnnnnnnnnnnnnnnnnnnnnnnnnnnnnnnnnnnnnnnnnnnnnnnnnnnnnnnnnnnnnnnnnnnnnnnnnnnnnnnnnnnnnnnnnnnnnnnnnnnnnnnnnnnnnnnnnnnnnnnnnnnnnnnnnnnnnnnnnnnnnnnnnnnnnnnnnnnnnnnnnnnnnnnnnnnnnnnnnnnnnnnnnnnnnnnnnnnnnnnnnnnnnnnnnnnnnnnnnnnnnnnnnnnnnnnnnnnnnnnnnnnnnnnnnnnnnnnnnnnnnnnnnnnnnnnnnnnnnnnnnnnnnnnnnnnnnnnnnnnnnnnnnnnnnnnnnnnnnnnnnnnnnnnnnnnnnnnnnnnnnnnnnnnnnnnnnnnnnnnnnnnnnnnnnnnnnnnnnnnnnnnnnnnnnnnnnnnnnnnnnnnnnnnnnnnnnnnnnnnnnnnnnnnnnnnnnnnnnnnnnnnnnnnnnnnnnnnnnnnnnnnnnnnnnnnnnnnnnnnnnnnnnnnnnnnnnnnnnnnnnnnnnnnnnnnnnnnnnnnnnnnnnnnnnnnnnnnnnnnnnnnnnnnnnnnnnnnnnnnnnnnnnnnnnnnnnnnnnnnnnnnnnnnnnnnnnnnnnnnnnnnnnnnnnnnnnnnnnnnnnnnnnnnnnnnnnnnnnnnnnnnnnnnnnnnnnnnnnnnnnnnnnnnnnnnnnnnnnnnnnnnnnnnnnnnnnnnnnnnnnnnnnnnnnnnnnnnnnnnnnnnnnnnnnnnnnnnnnnnnnnnnnnnnnnnnnnnnnnnnnnnnnnnnnnnnnnnnnnnnnnnnnnnnnnnnnnnnnnnnnnnnnnnnnnnnnnnnnnnnnnnnnnnnnnnnnnnnnnnnnnnnnnnnnnnnnnnnnnnnnnnnnnnnnnnnnnnnnnnnnnnnnnnnnnnnnnnnnnnnnnnnnnnnnnnnnnnnnnnnnnnnnnnnnnnnnnnnnnnnnnnnnnnnnnnnnnnnnnnnnnnnnnnnnnnnnnnnnnnnnnnnnnnnnnnnnnnnnnnnnnnnnnnnnnnnnnnnnnnnnnnnnnnnnnnnnnnnnnnnnnnnnnnnnnnnnnnnnnnnnnnnnnnnnnnnnnnnnnnnnnnnnnnnnnnnnnnnnnnnnnnnnnnnnnnnnnnnnnnnnnnnnnnnnnnnnnnnnnnnnnnnnnnnnnnnnnnnnnnnnnnnnnnnnnnnnnnnnnnnnnnnnnnnnnnnnnnnnnnnnnnnnnnnnnnnnnnnnnnnnnnnnnnnnnnnnnnnnnnnnnnnnnnnnnnnnnnnnnnnnnnnnnnnnnnnnnnnnnnnnnnnnnnnnnnnnnnnnnnnnnnnnnnnnnnnnnnnnnnnnnnnnnnnnnnnnnnnnnnnnnnnnnnnnnnnnnnnnnnnnnnnnnnnnnnnnnnnnnnnnnnnnnnnnnnnnnnnnnnnnnnnnnnnnnnnnnnnnnnnnnnnnnnnnnnnnnnnnnnnnnnnnnnnnnnnnnnnnnnnnnnnnnnnnnnnnnnnnnnnnnnnnnnnnnnnnnnnnnnnnnnnnnnnnnnnnnnnnnnnnnnnnnnnnnnnnnnnnnnnnnnnnnnnnnnnnnnnnnnnnnnnnnnnnnnnnnnnnnnnnnnnnnnnnnnnnnnnnnnnnnnnnnnnnnnnnnnnnnnnnnnnnnnnnnnnnnnnnnnnnnnnnnnnnnnnnnnnnnnnnnnnnnnnnnnnnnnnnnnnnnnnnnnnnnnnnnnnnnnnnnnnnnnnnnnnnnnnnnnnnnnnnnnnnnnnnnnnnnnnnnnnnnnnnnnnnnnnnnnnnnnnnnnnnnnnnnnnnnnnnnnnnnnnnnnnnnnnnnnnnnnnnnnnnnnnnnnnnnnnnnnnnnnnnnnnnnnnnnnnnnnnnnnnnnnnnnnnnnnnnnnnnnnnnnnnnnnnnnnnnnnnnnnnnnnnnnnnnnnnnnnnnnnnnnnnnnnnnnnnnnnnnnnnnnnnnnnnnnnnnnnnnnnnnnnnnnnnnnnnnnnnnnnnnnnnnnnnnnnnnnnnnnnnnnnnnnnnnnnnnnnnnnnnnnnnnnnnnnnnnnnnnnnnnnnnnnnnnnnnnnnnnnnnnnnnnnnnnnnnnnnnnnnnnnnnnnnnnnnnnnnnnnnnnnnnnnnnnnnnnnnnnnnnnnnnnnnnnnnnnnnnnnnnnnnnnnnnnnnnnnnnnnnnnnnnnnnnnnnnnnnnnnnnnnnnnnnnnnnnnnnnnnnnnnnnnnnnnnnnnnnnnnnnnnnnnnnnnnnnnnnnnnnnnnnnnnnnnnnnnnnnnnnnnnnnnnnnnnnnnnnnnnnnnnnnnnnnnnnnnnnnnnnnnnnnnnnnnnnnnnnnnnnnnnnnnnnnnnnnnnnnnnnnnnnnnnnnnnnnnnnnnnnnnnnnnnnnnnnnnnnnnnnnnnnnnnnnnnnnnnnnnnnnnnnnnnnnnnnnnnnnnnnnnnnnnnnnnnnnnnnnnnnnnnnnnnnnnnnnnnnnnnnnnnnnnnnnnnnnnnnnnnnnnnnnnnnnnnnnnnnnnnnnnnnnnnnnnnnnnnnnnnnnnnnnnnnnnnnnnnnnnnnnnnnnnnnnnnnnnnnnnnnnnnnnnnnnnnnnnnnnnnnnnnnnnnnnnnnnnnnnnnnnnnnnnnnnnnnnnnnnnnnnnnnnnnnnnnnnnnnnnnnnnnnnnnnnnnnnnnnnnnnnnnnnnnnnnnnnnnnnnnnnnnnnnnnnnnnnnnnnnnnnnnnnnnnnnnnnnnnnnnnnnnnnnnnnnnnnnnnnnnnnnnnnnnnnnnnnnnnnnnnnnnnnnnnnnnnnnnnnnnnnnnnnnnnnnnnnnnnnnnnnnnnnnnnnnnnnnnnnnnnnnnnnnnnnnnnnnnnnnnnnnnnnnnnnnnnnnnnnnnnnnnnnnnnnnnnnnnnnnnnnnnnnnnnnnnnnnnnnnnnnnnnnnnnnnnnnnnnnnnnnnnnnnnnnnnnnnnnnnnnnnnnnnnnnnnnnnnnnnnnnnnnnnnnnnnnnnnnnnnnnnnnnnnnnnnnnnnnnnnnnnnnnnnnnnnnnnnnnnnnnnnnnnnnnnnnnnnnnnnnnnnnnnnnnnnnnnnnnnnnnnnnnnnnnnnnnnnnnnnnnnnnnnnnnnnnnnnnnnnnnnnnnnnnnnnnnnnnnnnnnnnnnnnnnnnnnnnnnnnnnnnnnnnnnnnnnnnnnnnnnnnnnnnnnnnnnnnnnnnnnnnnnnnnnnnnnnnnnnnnnnnnnnnnnnnnnnnnnnnnnnnnnnnnnnnnnnnnnnnnnnnnnnnnnnnnnnnnnnnnnnnnnnnnnnnnnnnnnnnnnnnnnnnnnnnnnnnnnnnnnnnnnnnnnnnnnnnnnnnnnnnnnnnnnnnnnnnnnnnnnnnnnnnnnnnnnnnnnnnnnnnnnnnnnnnnnnnnnnnnnnnnnnnnnnnnnnnnnnnnnnnnnnnnnnnnnnnnnnnnnnnnnnnnnnnnnnnnnnnnnnnnnnnnnnnnnnnnnnnnnnnnnnnnnnnnnnnnnnnnnnnnnnnnnnnnnnnnnnnnnnnnnnnnnnnnnnnnnnnnnnnnnnnnnnnnnnnnnnnnnnnnnnnnnnnnnnnnnnnnnnnnnnnnnnnnnnnnnnnnnnnnnnnnnnnnnnnnnnnnnnnnnnnnnnnnnnnnnnnnnnnnnnnnnnnnnnnnnnnnnnnnnnnnnnnnnnnnnnnnnnnnnnnnnnnnnnnnnnnnnnnnnnnnnnnnnnnnnnnnnnnnnnnnnnnnnnnnnnnnnnnnnnnnnnnnnnnnnnnnnnnnnnnnnnnnnnnnnnnnnnnnnnnnnnnnnnnnnnnnnnnnnnnnnnnnnnnnnnnnnnnnnnnnnnnnnnnnnnnnnnnnnnnnnnnnnnnnnnnnnnnnnnnnnnnnnnnnnnnnnnnnnnnnnnnnnnnnnnnnnnnnnnnnnnnnnnnnnnnnnnnnnnnnnnnnnnnnnnnnnnnnnnnnnnnnnnnnnnnnnnnnnnnnnnnnnnnnnnnnnnnnnnnnnnnnnnnnnnnnnnnnnnnnnnnnnnnnnnnnnnnnnnnnnnnnnnnnnnnnnnnnnnnnnnnnnnnnnnnnnnnnnnnnnnnnnnnnnnnnnnnnnnnnnnnnnnnnnnnnnnnnnnnnnnnnnnnnnnnnnnnnnnnnnnnnnnnnnnnnnnnnnnnnnnnnnnnnnnnnnnnnnnnnnnnnnnnnnnnnnnnnnnnnnnnnnnnnnnnnnnnnnnnnnnnnnnnnnnnnnnnnnnnnnnnnnnnnnnnnnnnnnnnnnnnnnnnnnnnnnnnnnnnnnnnnnnnnnnnnnnnnnnnnnnnnnnnnnnnnnnnnnnnnnnnnnnnnnnnnnnnnnnnnnnnnnnnnnnnnnnnnnnnnnnnnnnnnnnnnnnnnnnnnnnnnnnnnnnnnnnnnnnnnnnnnnnnnnnnnnnnnnnnnnnnnnnnnnnnnnnnnnnnnnnnnnnnnnnnnnnnnnnnnnnnnnnnnnnnnnnnnnnnnnnnnnnnnnnnnnnnnnnnnnnnnnnnnnnnnnnnnnnnnnnnnnnnnnnnnnnnnnnnnnnnnnnnnnnnnnnnnnnnnnnnnnnnnnnnnnnnnnnnnnnnnnnnnnnnnnnnnnnnnnnnnnnnnnnnnnnnnnnnnnnnnnnnnnnnnnnnnnnnnnnnnnnnnnnnnnnnnnnnnnnnnnnnnnnnnnnnnnnnnnnnnnnnnnnnnnnnnnnnnnnnnnnnnnnnnnnnnnnnnnnnnnnnnnnnnnnnnnnnnnnnnnnnnnnnnnnnnnnnnnnnnnnnnnnnnnnnnnnnnnnnnnnnnnnnnnnnnnnnnnnnnnnnnnnnnnnnnnnnnnnnnnnnnnnnnnnnnnnnnnnnnnnnnnnnnnnnnnnnnnnnnnnnnnnnnnnnnnnnnnnnnnnnnnnnnnnnnnnnnnnnnnnnnnnnnnnnnnnnnnnnnnnnnnnnnnnnnnnnnnnnnnnnnnnnnnnnnnnnnnnnnnnnnnnnnnnnnnnnnnnnnnnnnnnnnnnnnnnnnnnnnnnnnnnnnnnnnnnnnnnnnnnnnnnnnnnnnnnnnnnnnnnnnnnnnnnnnnnnnnnnnnnnnnnnnnnnnnnnnnnnnnnnnnnnnnnnnnnnnnnnnnnnnnnnnnnnnnnnnnnnnnnnnnnnnnnnnnnnnnnnnnnnnnnnnnnnnnnnnnnnnnnnnnnnnnnnnnnnnnnnnnnnnnnnnnnnnnnnnnnnnnnnnnnnnnnnnnnnnnnnnnnnnnnnnnnnnnnnnnnnnnnnnnnnnnnnnnnnnnnnnnnnnnnnnnnnnnnnnnnnnnnnnnnnnnnnnnnnnnnnnnnnnnnnnnnnnnnnnnnnnnnnnnnnnnnnnnnnnnnnnnnnnnnnnnnnnnnnnnnnnnnnnnnnnnnnnnnnnnnnnnnnnnnnnnnnnnnnnnnnnnnnnnnnnnnnnnnnnnnnnnnnnnnnnnnnnnnnnnnnnnnnnnnnnnnnnnnnnnnnnnnnnnnnnnnnnnnnnnnnnnnnnnnnnnnnnnnnnnnnnnnnnnnnnnnnnnnnnnnnnnnnnnnnnnnnnnnnnnnnnnnnnnnnnnnnnnnnnnnnnnnnnnnnnnnnnnnnnnnnnnnnnnnnnnnnnnnnnnnnnnnnnnnnnnnnnnnnnnnnnnnnnnnnnnnnnnnnnnnnnnnnnnnnnnnnnnnnnnnnnnnnnnnnnnnnnnnnnnnnnnnnnnnnnnnnnnnnnnnnnnnnnnnnnnnnnnnnnnnnnnnnnnnnnnnnnnnnnnnnnnnnnnnnnnnnnnnnnnnnnnnnnnnnnnnnnnnnnnnnnnnnnnnnnnnnnnnnnnnnnnnnnnnnnnnnnnnnnnnnnnnnnnnnnnnnnnnnnnnnnnnnnnnnnnnnnnnnnnnnnnnnnnnnnnnnnnnnnnnnnnnnnnnnnnnnnnnnnnnnnnnnnnnnnnnnnnnnnnnnnnnnnnnnnnnnnnnnnnnnnnnnnnnnnnnnnnnnnnnnnnnnnnnnnnnnnnnnnnnnnnnnnnnnnnnnnnnnnnnnnnnnnnnnnnnnnnnnnnnnnnnnnnnnnnnnnnnnnnnnnnnnnnnnnnnnnnnnnnnnnnnnnnnnnnnnnnnnnnnnnnnnnnnnnnnnnnnnnnnnnnnnnnnnnnnnnnnnnnnnnnnnnnnnnnnnnnnnnnnnnnnnnnnnnnnnnnnnnnnnnnnnnnnnnnnnnnnnnnnnnnnnnnnnnnnnnnnnnnnnnnnnnnnnnnnnnnnnnnnnnnnnnnnnnnnnnnnnnnnnnnnnnnnnnnnnnnnnnnnnnnnnnnnnnnnnnnnnnnnnnnnnnnnnnnnnnnnnnnnnnnnnnnnnnnnnnnnnnnnnnnnnnnnnnnnnnnnnnnnnnnnnnnnnnnnnnnnnnnnnnnnnnnnnnnnnnnnnnnnnnnnnnnnnnnnnnnnnnnnnnnnnnnnnnnnnnnnnnnnnnnnnnnnnnnnnnnnnnnnnnnnnnnnnnnnnnnnnnnnnnnnnnnnnnnnnnnnnnnnnnnnnnnnnnnnnnnnnnnnnnnnnnnnnnnnnnnnnnnnnnnnnnnnnnnnnnnnnnnnnnnnnnnnnnnnnnnnnnnnnnnnnnnnnnnnnnnnnnnnnnnnnnnnnnnnnnnnnnnnnnnnnnnnnnnnnnnnnnnnnnnnnnnnnnnnnnnnnnnnnnnnnnnnnnnnnnnnnnnnnnnnnnnnnnnnnnnnnnnnnnnnnnnnnnnnnnnnnnnnnnnnnnnnnnnnnnnnnnnnnnnnnnnnnnnnnnnnnnnnnnnnnnnnnnnnnnnnnnnnnnnnnnnnnnnnnnnnnnnnnnnnnnnnnnnnnnnnnnnnnnnnnnnnnnnnnnnnnnnnnnnnnnnnnnnnnnnnnnnnnnnnnnnnnnnnnnnnnnnnnnnnnnnnnnnnnnnnnnnnnnnnnnnnnnnnnnnnnnnnnnnnnnnnnnnnnnnnnnnnnnnnnnnnnnnnnnnnnnnnnnnnnnnnnnnnnnnnnnnnnnnnnnnnnnnnnnnnnnnnnnnnnnnnnnnnnnnnnnnnnnnnnnnnnnnnnnnnnnnnnnnnnnnnnnnnnnnnnnnnnnnnnnnnnnnnnnnnnnnnnnnnnnnnnnnnnnnnnnnnnnnnnnnnnnnnnnnnnnnnnnnnnnnnnnnnnnnnnnnnnnnnnnnnnnnnnnnnnnnnnnnnnnnnnnnnnnnnnnnnnnnnnnnnnnnnnnnnnnnnnnnnnnnnnnnnnnnnnnnnnnnnnnnnnnnnnnnnnnnnnnnnnnnnnnnnnnnnnnnnnnnnnnnnnnnnnnnnnnnnnnnnnnnnnnnnnnnnnnnnnnnnnnnnnnnnnnnnnnnnnnnnnnnnnnnnnnnnnnnnnnnnnnnnnnnnnnnnnnnnnnnnnnnnnnnnnnnnnnnnnnnnnnnnnnnnnnnnnnnnnnnnnnnnnnnnnnnnnnnnnnnnnnnnnnnnnnnnnnnnnnnnnnnnnnnnnnnnnnnnnnnnnnnnnnnnnnnnnnnnnnnnnnnnnnnnnnnnnnnnnnnnnnnnnnnnnnnnnnnnnnnnnnnnnnnnnnnnnnnnnnnnnnnnnnnnnnnnnnnnnnnnnnnnnnnnnnnnnnnnnnnnnnnnnnnnnnnnnnnnnnnnnnnnnnnnnnnnnnnnnnnnnnnnnnnnnnnnnnnnnnnnnnnnnnnnnnnnnnnnnnnnnnnnnnnnnnnnnnnnnnnnnnnnnnnnnnnnnnnnnnnnnnnnnnnnnnnnnnnnnnnnnnnnnnnnnnnnnnnnnnnnnnnnnnnnnnnnnnnnnnnnnnnnnnnnnnnnnnnnnnnnnnnnnnnnnnnnnnnnnnnnnnnnnnnnnnnnnnnnnnnnnnnnnnnnnnnnnnnnnnnnnnnnnnnnnnnnnnnnnnnnnnnnnnnnnnnnnnnnnnnnnnnnnnnnnnnnnnnnnnnnnnnnnnnnnnnnnnnnnnnnnnnnnnnnnnnnnnnnnnnnnnnnnnnnnnnnnnnnnnnnnnnnnnnnnnnnnnnnnnnnnnnnnnnnnnnnnnnnnnnnnnnnnnnnnnnnnnnnnnnnnnnnnnnnnnnnnnnnnnnnnnnnnnnnnnnnnnnnnnnnnnnnnnnnnnnnnnnnnnnnnnnnnnnnnnnnnnnnnnnnnnnnnnnnnnnnnnnnnnnnnnnnnnnnnnnnnnnnnnnnnnnnnnnnnnnnnnnnnnnnnnnnnnnnnnnnnnnnnnnnnnnnnnnnnnnnnnnnnnnnnnnnnnnnnnnnnnnnnnnnnnnnnnnnnnnnnnnnnnnnnnnnnnnnnnnnnnnnnnnnnnnnnnnnnnnnnnnnnnnnnnnnnnnnnnnnnnnnnnnnnnnnnnnnnnnnnnnnnnnnnnnnnnnnnnnnnnnnnnnnnnnnnnnnnnnnnnnnnnnnnnnnnnnnnnnnnnnnnnnnnnnnnnnnnnnnnnnnnnnnnnnnnnnnnnnnnnnnnnnnnnnnnnnnnnnnnnnnnnnnnnnnnnnnnnnnnnnnnnnnnnnnnnnnnnnnnnnnnnnnnnnnnnnnnnnnnnnnnnnnnnnnnnnnnnnnnnnnnnnnnnnnnnnnnnnnnnnnnnnnnnnnnnnnnnnnnnnnnnnnnnnnnnnnnnnnnnnnnnnnnnnnnnnnnnnnnnnnnnnnnnnnnnnnnnnnnnnnnnnnnnnnnnnnnnnnnnnnnnnnnnnnnnnnnnnnnnnnnnnnnnnnnnnnnnnnnnnnnnnnnnnnnnnnnnnnnnnnnnnnnnnnnnnnnnnnnnnnnnnnnnnnnnnnnnnnnnnnnnnnnnnnnnnnnnnnnnnnnnnnnnnnnnnnnnnnnnnnnnnnnnnnnnnnnnnnnnnnnnnnnnnnnnnnnnnnnnnnnnnnnnnnnnnnnnnnnnnnnnnnnnnnnnnnnnnnnnnnnnnnnnnnnnnnnnnnnnnnnnnnnnnnnnnnnnnnnnnnnnnnnnnnnnnnnnnnnnnnnnnnnnnnnnnnnnnnnnnnnnnnnnnnnnnnnnnnnnnnnnnnnnnnnnnnnnnnnnnnnnnnnnnnnnnnnnnnnnnnnnnnnnnnnnnnnnnnnnnnnnnnnnnnnnnnnnnnnnnnnnnnnnnnnnnnnnnnnnnnnnnnnnnnnnnnnnnnnnnnnnnnnnnnnnnnnnnnnnnnnnnnnnnnnnnnnnnnnnnnnnnnnnnnnnnnnnnnnnnnnnnnnnnnnnnnnnnnnnnnnnnnnnnnnnnnnnnnnnnnnnnnnnnnnnnnnnnnnnnnnnnnnnnnnnnnnnnnnnnnnnnnnnnnnnnnnnnnnnnnnnnnnnnnnnnnnnnnnnnnnnnnnnnnnnnnnnnnnnnnnnnnnnnnnnnnnnnnnnnnnnnnnnnnnnnnnnnnnnnnnnnnnnnnnnnnnnnnnnnnnnnnnnnnnnnnnnnnnnnnnnnnnnnnnnnnnnnnnnnnnnnnnnnnnnnnnnnnnnnnnnnnnnnnnnnnnnnnnnnnnnnnnnnnnnnnnnnnnnnnnnnnnnnnnnnnnnnnnnnnnnnnnnnnnnnnnnnnnnnnnnnnnnnnnnnnnnnnnnnnnnnnnnnnnnnnnnnnnnnnnnnnnnnnnnnnnnnnnnnnnnnnnnnnnnnnnnnnnnnnnnnnnnnnnnnnnnnnnnnnnnnnnnnnnnnnnnnnnnnnnnnnnnnnnnnnnnnnnnnnnnnnnnnnnnnnnnnnnnnnnnnnnnnnnnnnnnnnnnnnnnnnnnnnnnnnnnnnnnnnnnnnnnnnnnnnnnnnnnnnnnnnnnnnnnnnnnnnnnnnnnnnnnnnnnnnnnnnnnnnnnnnnnnnnnnnnnnnnnnnnnnnnnnnnnnnnnnnnnnnnnnnnnnnnnnnnnnnnnnnnnnnnnnnnnnnnnnnnnnnnnnnnnnnnnnnnnnnnnnnnnnnnnnnnnnnnnnnnnnnnnnnnnnnnnnnnnnnnnnnnnnnnnnnnnnnnnnnnnnnnnnnnnnnnnnnnnnnnnnnnnnnnnnnnnnnnnnnnnnnnnnnnnnnnnnnnnnnnnnnnnnnnnnnnnnnnnnnnnnnnnnnnnnnnnnnnnnnnnnnnnnnnnnnnnnnnnnnnnnnnnnnnnnnnnnnnnnnnnnnnnnnnnnnnnnnnnnnnnnnnnnnnnnnnnnnnnnnnnnnnnnnnnnnnnnnnnnnnnnnnnnnnnnnnnnnnnnnnnnnnnnnnnnnnnnnnnnnnnnnnnnnnnnnnnnnnnnnnnnnnnnnnnnnnnnnnnnnnnnnnnnnnnnnnnnnnnnnnnnnnnnnnnnnnnnnnnnnnnnnnnnnnnnnnnnnnnnnnnnnnnnnnnnnnnnnnnnnnnnnnnnnnnnnnnnnnnnnnnnnnnnnnnnnnnnnnnnnnnnnnnnnnnnnnnnnnnnnnnnnnnnnnnnnnnnnnnnnnnnnnnnnnnnnnnnnnnnnnnnnnnnnnnnnnnnnnnnnnnnnnnnnnnnnnnnnnnnnnnnnnnnnnnnnnnnnnnnnnnnnnnnnnnnnnnnnnnnnnnnnnnnnnnnnnnnnnnnnnnnnnnnnnnnnnnnnnnnnnnnnnnnnnnnnnnnnnnnnnnnnnnnnnnnnnnnnnnnnnnnnnnnnnnnnnnnnnnnnnnnnnnnnnnnnnnnnnnnnnnnnnnnnnnnnnnnnnnnnnnnnnnnnnnnnnnnnnnnnnnnnnnnnnnnnnnnnnnnnnnnnnnnnnnnnnnnnnnnnnnnnnnnnnnnnnnnnnnnnnnnnnnnnnnnnnnnnnnnnnnnnnnnnnnnnnnnnnnnnnnnnnnnnnnnnnnnnnnnnnnnnnnnnnnnnnnnnnnnnnnnnnnnnnnnnnnnnnnnnnnnnnnnnnnnnnnnnnnnnnnnnnnnnnnnnnnnnnnnnnnnnnnnnnnnnnnnnnnnnnnnnnnnnnnnnnnnnnnnnnnnnnnnnnnnnnnnnnnnnnnnnnnnnnnnnnnnnnnnnnnnnnnnnnnnnnnnnnnnnnnnnnnnnnnnnnnnnnnnnnnnnnnnnnnnnnnnnnnnnnnnnnnnnnnnnnnnnnnnnnnnnnnnnnnnnnnnnnnnnnnnnnnnnnnnnnnnnnnnnnnnnnnnnnnnnnnnnnnnnnnnnnnnnnnnnnnnnnnnnnnnnnnnnnnnnnnnnnnnnnnnnnnnnnnnnnnnnnnnnnnnnnnnnnnnnnnnnnnnnnnnnnnnnnnnnnnnnnnnnnnnnnnnnnnnnnnnnnnnnnnnnnnnnnnnnnnnnnnnnnnnnnnnnnnnnnnnnnnnnnnnnnnnnnnnnnnnnnnnnnnnnnnnnnnnnnnnnnnnnnnnnnnnnnnnnnnnnnnnnnnnnnnnnnnnnnnnnnnnnnnnnnnnnnnnnnnnnnnnnnnnnnnnnnnnnnnnnnnnnnnnnnnnnnnnnnnnnnnnnnnnnnnnnnnnnnnnnnnnnnnnnnnnnnnnnnnnnnnnnnnnnnnnnnnnnnnnnnnnnnnnnnnnnnnnnnnnnnnnnnnnnnnnnnnnnnnnnnnnnnnnnnnnnnnnnnnnnnnnnnnnnnnnnnnnnnnnnnnnnnnnnnnnnnnnnnnnnnnnnnnnnnnnnnnnnnnnnnnnnnnnnnnnnnnnnnnnnnnnnnnnnnnnnnnnnnnnnnnnnnnnnnnnnnnnnnnnnnnnnnnnnnnnnnnnnnnnnnnnnnnnnnnnnnnnnnnnnnnnnnnnnnnnnnnnnnnnnnnnnnnnnnnnnnnnnnnnnnnnnnnnnnnnnnnnnnnnnnnnnnnnnnnnnnnnnnnnnnnnnnnnnnnnnnnnnnnnnnnnnnnnnnnnnnnnnnnnnnnnnnnnnnnnnnnnnnnnnnnnnnnnnnnnnnnnnnnnnnnnnnnnnnnnnnnnnnnnnnnnnnnnnnnnnnnnnnnnnnnnnnnnnnnnnnnnnnnnnnnnnnnnnnnnnnnnnnnnnnnnnnnnnnnnnnnnnnnnnnnnnnnnnnnnnnnnnnnnnnnnnnnnnnnnnnnnnnnnnnnnnnnnnnnnnnnnnnnnnnnnnnnnnnnnnnnnnnnnnnnnnnnnnnnnnnnnnnnnnnnnnnnnnnnnnnnnnnnnnnnnnnnnnnnnnnnnnnnnnnnnnnnnnnnnnnnnnnnnnnnnnnnnnnnnnnnnnnnnnnnnnnnnnnnnnnnnnnnnnnnnnnnnnnnnnnnnnnnnnnnnnnnnnnnnnnnnnnnnnnnnnnnnnnnnnnnnnnnnnnnnnnnnnnnnnnnnnnnnnnnnnnnnnnnnnnnnnnnnnnnnnnnnnnnnnnnnnnnnnnnnnnnnnnnnnnnnnnnnnnnnnnnnnnnnnnnnnnnnnnnnnnnnnnnnnnnnnnnnnnnnnnnnnnnnnnnnnnnnnnnnnnnnnnnnnnnnnnnnnnnnnnnnnnnnnnnnnnnnnnnnnnnnnnnnnnnnnnnnnnnnnnnnnnnnnnnnnnnnnnnnnnnnnnnnnnnnnnnnnnnnnnnnnnnnnnnnnnnnnnnnnnnnnnnnnnnnnnnnnnnnnnnnnnnnnnnnnnnnnnnnnnnnnnnnnnnnnnnnnnnnnnnnnnnnnnnnnnnnnnnnnnnnnnnnnnnnnnnnnnnnnnnnnnnnnnnnnnnnnnnnnnnnnnnnnnnnnnnnnnnnnnnnnnnnnnnnnnnnnnnnnnnnnnnnnnnnnnnnnnnnnnnnnnnnnnnnnnnnnnnnnnnnnnnnnnnnnnnnnnnnnnnnnnnnnnnnnnnnnnnnnnnnnnnnnnnnnnnnnnnnnnnnnnnnnnnnnnnnnnnnnnnnnnnnnnnnnnnnnnnnnnnnnnnnnnnnnnnnnnnnnnnnnnnnnnnnnnnnnnnnnnnnnnnnnnnnnnnnnnnnnnnnnnnnnnnnnnnnnnnnnnnnnnnnnnnnnnnnnnnnnnnnnnnnnnnnnnnnnnnnnnnnnnnnnnnnnnnnnnnnnnnnnnnnnnnnnnnnnnnnnnnnnnnnnnnnnnnnnnnnnnnnnnnnnnnnnnnnnnnnnnnnnnnnnnnnnnnnnnnnnnnnnnnnnnnnnnnnnnnnnnnnnnnnnnnnnnnnnnnnnnnnnnnnnnnnnnnnnnnnnnnnnnnnnnnnnnnnnnnnnnnnnnnnnnnnnnnnnnnnnnnnnnnnnnnnnnnnnnnnnnnnnnnnnnnnnnnnnnnnnnnnnnnnnnnnnnnnnnnnnnnnnnnnnnnnnnnnnnnnnnnnnnnnnnnnnnnnnnnnnnnnnnnnnnnnnnnnnnnnnnnnnnnnnnnnnnnnnnnnnnnnnnnnnnnnnnnnnnnnnnnnnnnnnnnnnnnnnnnnnnnnnnnnnnnnnnnnnnnnnnnnnnnnnnnnnnnnnnnnnnnnnnnnnnnnnnnnnnnnnnnnnnnnnnnnnnnnnnnnnnnnnnnnnnnnnnnnnnnnnnnnnnnnnnnnnnnnnnnnnnnnnnnnnnnnnnnnnnnnnnnnnnnnnnnnnnnnnnnnnnnnnnnnnnnnnnnnnnnnnnnnnnnnnnnnnnnnnnnnnnnnnnnnnnnnnnnnnnnnnnnnnnnnnnnnnnnnnnnnnnnnnnnnnnnnnnnnnnnnnnnnnnnnnnnnnnnnnnnnnnnnnnnnnnnnnnnnnnnnnnnnnnnnnnnnnnnnnnnnnnnnnnnnnnnnnnnnnnnnnnnnnnnnnnnnnnnnnnnnnnnnnnnnnnnnnnnnnnnnnnnnnnnnnnnnnnnnnnnnnnnnnnnnnnnnnnnnnnnnnnnnnnnnnnnnnnnnnnnnnnnnnnnnnnnnnnnnnnnnnnnnnnnnnnnnnnnnnnnnnnnnnnnnnnnnnnnnnnnnnnnnnnnnnnnnnnnnnnnnnnnnnnnnnnnnnnnnnnnnnnnnnnnnnnnnnnnnnnnnnnnnnnnnnnnnnnnnnnnnnnnnnnnnnnnnnnnnnnnnnnnnnnnnnnnnnnnnnnnnnnnnnnnnnnnnnnnnnnnnnnnnnnnnnnnnnnnnnnnnnnnnnnnnnnnnnnnnnnnnnnnnnnnnnnnnnnnnnnnnnnnnnnnnnnnnnnnnnnnnnnnnnnnnnnnnnnnnnnnnnnnnnnnnnnnnnnnnnnnnnnnnnnnnnnnnnnnnnnnnnnnnnnnnnnnnnnnnnnnnnnnnnnnnnnnnnnnnnnnnnnnnnnnnnnnnnnnnnnnnnnnnnnnnnnnnnnnnnnnnnnnnnnnnnnnnnnnnnnnnnnnnnnnnnnnnnnnnnnnnnnnnnnnnnnnnnnnnnnnnnnnnnnnnnnnnnnnnnnnnnnnnnnnnnnnnnnnnnnnnnnnnnnnnnnnnnnnnnnnnnnnnnnnnnnnnnnnnnnnnnnnnnnnnnnnnnnnnnnnnnnnnnnnnnnnnnnnnnnnnnnnnnnnnnnnnnnnnnnnnnnnnnnnnnnnnnnnnnnnnnnnnnnnnnnnnnnnnnnnnnnnnnnnnnnnnnnnnnnnnnnnnnnnnnnnnnnnnnnnnnnnnnnnnnnnnnnnnnnnnnnnnnnnnnnnnnnnnnnnnnnnnnnnnnnnnnnnnnnnnnnnnnnnnnnnnnnnnnnnnnnnnnnnnnnnnnnnnnnnnnnnnnnnnnnnnnnnnnnnnnnnnnnnnnnnnnnnnnnnnnnnnnnnnnnnnnnnnnnnnnnnnnnnnnnnnnnnnnnnnnnnnnnnnnnnnnnnnnnnnnnnnnnnnnnnnnnnnnnnnnnnnnnnnnnnnnnnnnnnnnnnnnnnnnnnnnnnnnnnnnnnnnnnnnnnnnnnnnnnnnnnnnnnnnnnnnnnnnnnnnnnnnnnnnnnnnnnnnnnnnnnnnnnnnnnnnnnnnnnnnnnnnnnnnnnnnnnnnnnnnnnnnnnnnnnnnnnnnnnnnnnnnnnnnnnnnnnnnnnnnnnnnnnnnnnnnnnnnnnnnnnnnnnnnnnnnnnnnnnnnnnnnnnnnnnnnnnnnnnnnnnnnnnnnnnnnnnnnnnnnnnnnnnnnnnnnnnnnnnnnnnnnnnnnnnnnnnnnnnnnnnnnnnnnnnnnnnnnnnnnnnnnnnnnnnnnnnnnnnnnnnnnnnnnnnnnnnnnnnnnnnnnnnnnnnnnnnnnnnnnnnnnnnnnnnnnnnnnnnnnnnnnnnnnnnnnnnnnnnnnnnnnnnnnnnnnnnnnnnnnnnnnnnnnnnnnnnnnnnnnnnnnnnnnnnnnnnnnnnnnnnnnnnnnnnnnnnnnnnnnnnnnnnnnnnnnnnnnnnnnnnnnnnnnnnnnnnnnnnnnnnnnnnnnnnnnnnnnnnnnnnnnnnnnnnnnnnnnnnnnnnnnnnnnnnnnnnnnnnnnnnnnnnnnnnnnnnnnnnnnnnnnnnnnnnnnnnnnnnnnnnnnnnnnnnnnnnnnnnnnnnnnnnnnnnnnnnnnnnnnnnnnnnnnnnnnnnnnnnnnnnnnnnnnnnnnnnnnnnnnnnnnnnnnnnnnnnnnnnnnnnnnnnnnnnnnnnnnnnnnnnnnnnnnnnnnnnnnnnnnnnnnnnnnnnnnnnnnnnnnnnnnnnnnnnnnnnnnnnnnnnnnnnnnnnnnnnnnnnnnnnnnnnnnnnnnnnnnnnnnnnnnnnnnnnnnnnnnnnnnnnnnnnnnnnnnnnnnnnnnnnnnnnnnnnnnnnnnnnnnnnnnnnnnnnnnnnnnnnnnnnnnnnnnnnnnnnnnnnnnnnnnnnnnnnnnnnnnnnnnnnnnnnnnnnnnnnnnnnnnnnnnnnnnnnnnnnnnnnnnnnnnnnnnnnnnnnnnnnnnnnnnnnnnnnnnnnnnnnnnnnnnnnnnnnnnnnnnnnnnnnnnnnnnnnnnnnnnnnnnnnnnnnnnnnnnnnnnnnnnnnnnnnnnnnnnnnnnnnnnnnnnnnnnnnnnnnnnnnnnnnnnnnnnnnnnnnnnnnnnnnnnnnnnnnnnnnnnnnnnnnnnnnnnnnnnnnnnnnnnnnnnnnnnnnnnnnnnnnnnnnnnnnnnnnnnnnnnnnnnnnnnnnnnnnnnnnnnnnnnnnnnnnnnnnnnnnnnnnnnnnnnnnnnnnnnnnnnnnnnnnnnnnnnnnnnnnnnnnnnnnnnnnnnnnnnnnnnnnnnnnnnnnnnnnnnnnnnnnnnnnnnnnnnnnnnnnnnnnnnnnnnnnnnnnnnnnnnnnnnnnnnnnnnnnnnnnnnnnnnnnnnnnnnnnnnnnnnnnnnnnnnnnnnnnnnnnnnnnnnnnnnnnnnnnnnnnnnnnnnnnnnnnnnnnnnnnnnnnnnnnnnnnnnnnnnnnnnnnnnnnnnnnnnnnnnnnnnnnnnnnnnnnnnnnnnnnnnnnnnnnnnnnnnnnnnnnnnnnnnnnnnnnnnnnnnnnnnnnnnnnnnnnnnnnnnnnnnnnnnnnnnnnnnnnnnnnnnnnnnnnnnnnnnnnnnnnnnnnnnnnnnnnnnnnnnnnnnnnnnnnnnnnnnnnnnnnnnnnnnnnnnnnnnnnnnnnnnnnnnnnnnnnnnnnnnnnnnnnnnnnnnnnnnnnnnnnnnnnnnnnnnnnnnnnnnnnnnnnnnnnnnnnnnnnnnnnnnnnnnnnnnnnnnnnnnnnnnnnnnnnnnnnnnnnnnnnnnnnnnnnnnnnnnnnnnnnnnnnnnnnnnnnnnnnnnnnnnnnnnnnnnnnnnnnnnnnnnnnnnnnnnnnnnnnnnnnnnnnnnnnnnnnnnnnnnnnnnnnnnnnnnnnnnnnnnnnnnnnnnnnnnnnnnnnnnnnnnnnnnnnnnnnnnnnnnnnnnnnnnnnnnnnnnnnnnnnnnnnnnnnnnnnnnnnnnnnnnnnnnnnnnnnnnnnnnnnnnnnnnnnnnnnnnnnnnnnnnnnnnnnnnnnnnnnnnnnnnnnnnnnnnnnnnnnnnnnnnnnnnnnnnnnnnnnnnnnnnnnnnnnnnnnnnnnnnnnnnnnnnnnnnnnnnnnnnnnnnnnnnnnnnnnnnnnnnnnnnnnnnnnnnnnnnnnnnnnnnnnnnnnnnnnnnnnnnnnnnnnnnnnnnnnnnnnnnnnnnnnnnnnnnnnnnnnnnnnnnnnnnnnnnnnnnnnnnnnnnnnnnnnnnnnnnnnnnnnnnnnnnnnnnnnnnnnnnnnnnnnnnnnnnnnnnnnnnnnnnnnnnnnnnnnnnnnnnnnnnnnnnnnnnnnnnnnnnnnnnnnnnnnnnnnnnnnnnnnnnnnnnnnnnnnnnnnnnnnnnnnnnnnnnnnnnnnnnnnnnnnnnnnnnnnnnnnnnnnnnnnnnnnnnnnnnnnnnnnnnnnnnnnnnnnnnnnnnnnnnnnnnnnnnnnnnnnnnnnnnnnnnnnnnnnnnnnnnnnnnnnnnnnnnnnnnnnnnnnnnnnnnnnnnnnnnnnnnnnnnnnnnnnnnnnnnnnnnnnnnnnnnnnnnnnnnnnnnnnnnnnnnnnnnnnnnnnnnnnnnnnnnnnnnnnnnnnnnnnnnnnnnnnnnnnnnnnnnnnnnnnnnnnnnnnnnnnnnnnnnnnnnnnnnnnnnnnnnnnnnnnnnnnnnnnnnnnnnnnnnnnnnnnnnnnnnnnnnnnnnnnnnnnnnnnnnnnnnnnnnnnnnnnnnnnnnnnnnnnnnnnnnnnnnnnnnnnnnnnnnnnnnnnnnnnnnnnnnnnnnnnnnnnnnnnnnnnnnnnnnnnnnnnnnnnnnnnnnnnnnnnnnnnnnnnnnnnnnnnnnnnnnnnnnnnnnnnnnnnnnnnnnnnnnnnnnnnnnnnnnnnnnnnnnnnnnnnnnnnnnnnnnnnnnnnnnnnnnnnnnnnnnnnnnnnnnnnnnnnnnnnnnnnnnnnnnnnnnnnnnnnnnnnnnnnnnnnnnnnnnnnnnnnnnnnnnnnnnnnnnnnnnnnnnnnnnnnnnnnnnnnnnnnnnnnnnnnnnnnnnnnnnnnnnnnnnnnnnnnnnnnnnnnnnnnnnnnnnnnnnnnnnnnnnnnnnnnnnnnnnnnnnnnnnnnnnnnnnnnnnnnnnnnnnnnnnnnnnnnnnnnnnnnnnnnnnnnnnnnnnnnnnnnnnnnnnnnnnnnnnnnnnnnnnnnnnnnnnnnnnnnnnnnnnnnnnnnnnnnnnnnnnnnnnnnnnnnnnnnnnnnnnnnnnnnnnnnnnnnnnnnnnnnnnnnnnnnnnnnnnnnnnnnnnnnnnnnnnnnnnnnnnnnnnnnnnnnnnnnnnnnnnnnnnnnnnnnnnnnnnnnnnnnnnnnnnnnnnnnnnnnnnnnnnnnnnnnnnnnnnnnnnnnnnnnnnnnnnnnnnnnnnnnnnnnnnnnnnnnnnnnnnnnnnnnnnnnnnnnnnnnnnnnnnnnnnnnnnnnnnnnnnnnnnnnnnnnnnnnnnnnnnnnnnnnnnnnnnnnnnnnnnnnnnnnnnnnnnnnnnnnnnnnnnnnnnnnnnnnnnnnnnnnnnnnnnnnnnnnnnnnnnnnnnnnnnnnnnnnnnnnnnnnnnnnnnnnnnnnnnnnnnnnnnnnnnnnnnnnnnnnnnnnnnnnnnnnnnnnnnnnnnnnnnnnnnnnnnnnnnnnnnnnnnnnnnnnnnnnnnnnnnnnnnnnnnnnnnnnnnnnnnnnnnnnnnnnnnnnnnnnnnnnnnnnnnnnnnnnnnnnnnnnnnnnnnnnnnnnnnnnnnnnnnnnnnnnnnnnnnnnnnnnnnnnnnnnnnnnnnnnnnnnnnnnnnnnnnnnnnnnnnnnnnnnnnnnnnnnnnnnnnnnnnnnnnnnnnnnnnnnnnnnnnnnnnnnnnnnnnnnnnnnnnnnnnnnnnnnnnnnnnnnnnnnnnnnnnnnnnnnnnnnnnnnnnnnnnnnnnnnnnnnnnnnnnnnnnnnnnnnnnnnnnnnnnnnnnnnnnnnnnnnnnnnnnnnnnnnnnnnnnnnnnnnnnnnnnnnnnnnnnnnnnnnnnnnnnnnnnnnnnnnnnnnnnnnnnnnnnnnnnnnnnnnnnnnnnnnnnnnnnnnnnnnnnnnnnnnnnnnnnnnnnnnnnnnnnnnnnnnnnnnnnnnnnnnnnnnnnnnnnnnnnnnnnnnnnnnnnnnnnnnnnnnnnnnnnnnnnnnnnnnnnnnnnnnnnnnnnnnnnnnnnnnnnnnnnnnnnnnnnnnnnnnnnnnnnnnnnnnnnnnnnnnnnnnnnnnnnnnnnnnnnnnnnnnnnnnnnnnnnnnnnnnnnnnnnnnnnnnnnnnnnnnnnnnnnnnnnnnnnnnnnnnnnnnnnnnnnnnnnnnnnnnnnnnnnnnnnnnnnnnnnnnnnnnnnnnnnnnnnnnnnnnnnnnnnnnnnnnnnnnnnnnnnnnnnnnnnnnnnnnnnnnnnnnnnnnnnnnnnnnnnnnnnnnnnnnnnnnnnnnnnnnnnnnnnnnnnnnnnnnnnnnnnnnnnnnnnnnnnnnnnnnnnnnnnnnnnnnnnnnnnnnnnnnnnnnnnnnnnnnnnnnnnnnnnnnnnnnnnnnnnnnnnnnnnnnnnnnnnnnnnnnnnnnnnnnnnnnnnnnnnnnnnnnnnnnnnnnnnnnnnnnnnnnnnnnnnnnnnnnnnnnnnnnnnnnnnnnnnnnnnnnnnnnnnnnnnnnnnnnnnnnnnnnnnnnnnnnnnnnnnnnnnnnnnnnnnnnnnnnnnnnnnnnnnnnnnnnnnnnnnnnnnnnnnnnnnnnnnnnnnnnnnnnnnnnnnnnnnnnnnnnnnnnnnnnnnnnnnnnnnnnnnnnnnnnnnnnnnnnnnnnnnnnnnnnnnnnnnnnnnnnnnnnnnnnnnnnnnnnnnnnnnnnnnnnnnnnnnnnnnnnnnnnnnnnnnnnnnnnnnnnnnnnnnnnnnnnnnnnnnnnnnnnnnnnnnnnnnnnnnnnnnnnnnnnnnnnnnnnnnnnnnnnnnnnnnnnnnnnnnnnnnnnnnnnnnnnnnnnnnnnnnnnnnnnnnnnnnnnnnnnnnnnnnnnnnnnnnnnnnnnnnnnnnnnnnnnnnnnnnnnnnnnnnnnnnnnnnnnnnnnnnnnnnnnnnnnnnnnnnnnnnnnnnnnnnnnnnnnnnnnnnnnnnnnnnnnnnnnnnnnnnnnnnnnnnnnnnnnnnnnnnnnnnnnnnnnnnnnnnnnnnnnnnnnnnnnnnnnnnnnnnnnnnnnnnnnnnnnnnnnnnnnnnnnnnnnnnnnnnnnnnnnnnnnnnnnnnnnnnnnnnnnnnnnnnnnnnnnnnnnnnnnnnnnnnnnnnnnnnnnnnnnnnnnnnnnnnnnnnnnnnnnnnnnnnnnnnnnnnnnnnnnnnnnnnnnnnnnnnnnnnnnnnnnnnnnnnnnnnnnnnnnnnnnnnnnnnnnnnnnnnnnnnnnnnnnnnnnnnnnnnnnnnnnnnnnnnnnnnnnnnnnnnnnnnnnnnnnnnnnnnnnnnnnnnnnnnnnnnnnnnnnnnnnnnnnnnnnnnnnnnnnnnnnnnnnnnnnnnnnnnnnnnnnnnnnnnnnnnnnnnnnnnnnnnnnnnnnnnnnnnnnnnnnnnnnnnnnnnnnnnnnnnnnnnnnnnnnnnnnnnnnnnnnnnnnnnnnnnnnnnnnnnnnnnnnnnnnnnnnnnnnnnnnnnnnnnnnnnnnnnnnnnnnnnnnnnnnnnnnnnnnnnnnnnnnnnnnnnnnnnnnnnnnnnnnnnnnnnnnnnnnnnnnnnnnnnnnnnnnnnnnnnnnnnnnnnnnnnnnnnnnnnnnnnnnnnnnnnnnnnnnnnnnnnnnnnnnnnnnnnnnnnnnnnnnnnnnnnnnnnnnnnnnnnnnnnnnnnnnnnnnnnnnnnnnnnnnnnnnnnnnnnnnnnnnnnnnnnnnnnnnnnnnnnnnnnnnnnnnnnnnnnnnnnnnnnnnnnnnnnnnnnnnnnnnnnnnnnnnnnnnnnnnnnnnnnnnnnnnnnnnnnnnnnnnnnnnnnnnnnnnnnnnnnnnnnnnnnnnnnnnnnnnnnnnnnnnnnnnnnnnnnnnnnnnnnnnnnnnnnnnnnnnnnnnnnnnnnnnnnnnnnnnnnnnnnnnnnnnnnnnnnnnnnnnnnnnnnnnnnnnnnnnnnnnnnnnnnnnnnnnnnnnnnnnnnnnnnnnnnnnnnnnnnnnnnnnnnnnnnnnnnnnnnnnnnnnnnnnnnnnnnnnnnnnnnnnnnnnnnnnnnnnnnnnnnnnnnnnnnnnnnnnnnnnnnnnnnnnnnnnnnnnnnnnnnnnnnnnnnnnnnnnnnnnnnnnnnnnnnnnnnnnnnnnnnnnnnnnnnnnnnnnnnnnnnnnnnnnnnnnnnnnnnnnnnnnnnnnnnnnnnnnnnnnnnnnnnnnnnnnnnnnnnnnnnnnnnnnnnnnnnnnnnnnnnnnnnnnnnnnnnnnnnnnnnnnnnnnnnnnnnnnnnnnnnnnnnnnnnnnnnnnnnnnnnnnnnnnnnnnnnnnnnnnnnnnnnnnnnnnnnnnnnnnnnnnnnnnnnnnnnnnnnnnnnnnnnnnnnnnnnnnnnnnnnnnnnnnnnnnnnnnnnnnnnnnnnnnnnnnnnnnnnnnnnnnnnnnnnnnnnnnnnnnnnnnnnnnnnnnnnnnnnnnnnnnnnnnnnnnnnnnnnnnnnnnnnnnnnnnnnnnnnnnnnnnnnnnnnnnnnnnnnnnnnnnnnnnnnnnnnnnnnnnnnnnnnnnnnnnnnnnnnnnnnnnnnnnnnnnnnnnnnnnnnnnnnnnnnnnnnnnnnnnnnnnnnnnnnnnnnnnnnnnnnnnnnnnnnnnnnnnnnnnnnnnnnnnnnnnnnnnnnnnnnnnnnnnnnnnnnnnnnnnnnnnnnnnnnnnnnnnnnnnnnnnnnnnnnnnnnnnnnnnnnnnnnnnnnnnnnnnnnnnnnnnnnnnnnnnnnnnnnnnnnnnnnnnnnnnnnnnnnnnnnnnnnnnnnnnnnnnnnnnnnnnnnnnnnnnnnnnnnnnnnnnnnnnnnnnnnnnnnnnnnnnnnnnnnnnnnnnnnnnnnnnnnnnnnnnnnnnnnnnnnnnnnnnnnnnnnnnnnnnnnnnnnnnnnnnnnnnnnnnnnnnnnnnnnnnnnnnnnnnnnnnnnnnnnnnnnnnnnnnnnnnnnnnnnnnnnnnnnnnnnnnnnnnnnnnnnnnnnnnnnnnnnnnnnnnnnnnnnnnnnnnnnnnnnnnnnnnnnnnnnnnnnnnnnnnnnnnnnnnnnnnnnnnnnnnnnnnnnnnnnnnnnnnnnnnnnnnnnnnnnnnnnnnnnnnnnnnnnnnnnnnnnnnnnnnnnnnnnnnnnnnnnnnnnnnnnnnnnnnnnnnnnnnnnnnnnnnnnnnnnnnnnnnnnnnnnnnnnnnnnnnnnnnnnnnnnnnnnnnnnnnnnnnnnnnnnnnnnnnnnnnnnnnnnnnnnnnnnnnnnnnnnnnnnnnnnnnnnnnnnnnnnnnnnnnnnnnnnnnnnnnnnnnnnnnnnnnnnnnnnnnnnnnnnnnnnnnnnnnnnnnnnnnnnnnnnnnnnnnnnnnnnnnnnnnnnnnnnnnnnnnnnnnnnnnnnnnnnnnnnnnnnnnnnnnnnnnnnnnnnnnnnnnnnnnnnnnnnnnnnnnnnnnnnnnnnnnnnnnnnnnnnnnnnnnnnnnnnnnnnnnnnnnnnnnnnnnnnnnnnnnnnnnnnnnnnnnnnnnnnnnnnnnnnnnnnnnnnnnnnnnnnnnnnnnnnnnnnnnnnnnnnnnnnnnnnnnnnnnnnnnnnnnnnnnnnnnnnnnnnnnnnnnnnnnnnnnnnnnnnnnnnnnnnnnnnnnnnnnnnnnnnnnnnnnnnnnnnnnnnnnnnnnnnnnnnnnnnnnnnnnnnnnnnnnnnnnnnnnnnnnnnnnnnnnnnnnnnnnnnnnnnnnnnnnnnnnnnnnnnnnnnnnnnnnnnnnnnnnnnnnnnnnnnnnnnnnnnnnnnnnnnnnnnnnnnnnnnnnnnnnnnnnnnnnnnnnnnnnnnnnnnnnnnnnnnnnnnnnnnnnnnnnnnnnnnnnnnnnnnnnnnnnnnnnnnnnnnnnnnnnnnnnnnnnnnnnnnnnnnnnnnnnnnnnnnnnnnnnnnnnnnnnnnnnnnnnnnnnnnnnnnnnnnnnnnnnnnnnnnnnnnnnnnnnnnnnnnnnnnnnnnnnnnnnnnnnnnnnnnnnnnnnnnnnnnnnnnnnnnnnnnnnnnnnnnnnnnnnnnnnnnnnnnnnnnnnnnnnnnnnnnnnnnnnnnnnnnnnnnnnnnnnnnnnnnnnnnnnnnnnnnnnnnnnnnnnnnnnnnnnnnnnnnnnnnnnnnnnnnnnnnnnnnnnnnnnnnnnnnnnnnnnnnnnnnnnnnnnnnnnnnnnnnnnnnnnnnnnnnnnnnnnnnnnnnnnnnnnnnnnnnnnnnnnnnnnnnnnnnnnnnnnnnnnnnnnnnnnnnnnnnnnnnnnnnnnnnnnnnnnnnnnnnnnnnnnnnnnnnnnnnnnnnnnnnnnnnnnnnnnnnnnnnnnnnnnnnnnnnnnnnnnnnnnnnnnnnnnnnnnnnnnnnnnnnnnnnnnnnnnnnnnnnnnnnnnnnnnnnnnnnnnnnnnnnnnnnnnnnnnnnnnnnnnnnnnnnnnnnnnnnnnnnnnnnnnnnnnnnnnnnnnnnnnnnnnnnnnnnnnnnnnnnnnnnnnnnnnnnnnnnnnnnnnnnnnnnnnnnnnnnnnnnnnnnnnnnnnnnnnnnnnnnnnnnnnnnnnnnnnnnnnnnnnnnnnnnnnnnnnnnnnnnnnnnnnnnnnnnnnnnnnnnnnnnnnnnnnnnnnnnnnnnnnnnnnnnnnnnnnnnnnnnnnnnnnnnnnnnnnnnnnnnnnnnnnnnnnnnnnnnnnnnnnnnnnnnnnnnnnnnnnnnnnnnnnnnnnnnnnnnnnnnnnnnnnnnnnnnnnnnnnnnnnnnnnnnnnnnnnnnnnnnnnnnnnnnnnnnnnnnnnnnnnnnnnnnnnnnnnnnnnnnnnnnnnnnnnnnnnnnnnnnnnnnnnnnnnnnnnnnnnnnnnnnnnnnnnnnnnnnnnnnnnnnnnnnnnnnnnnnnnnnnnnnnnnnnnnnnnnnnnnnnnnnnnnnnnnnnnnnnnnnnnnnnnnnnnnnnnnnnnnnnnnnnnnnnnnnnnnnnnnnnnnnnnnnnnnnnnnnnnnnnnnnnnnnnnnnnnnnnnnnnnnnnnnnnnnnnnnnnnnnnnnnnnnnnnnnnnnnnnnnnnnnnnnnnnnnnnnnnnnnnnnnnnnnnnnnnnnnnnnnnnnnnnnnnnnnnnnnnnnnnnnnnnnnnnnnnnnnnnnnnnnnnnnnnnnnnnnnnnnnnnnnnnnnnnnnnnnnnnnnnnnnnnnnnnnnnnnnnnnnnnnnnnnnnnnnnnnnnnnnnnnnnnnnnnnnnnnnnnnnnnnnnnnnnnnnnnnnnnnnnnnnnnnnnnnnnnnnnnnnnnnnnnnnnnnnnnnnnnnnnnnnnnnnnnnnnnnnnnnnnnnnnnnnnnnnnnnnnnnnnnnnnnnnnnnnnnnnnnnnnnnnnnnnnnnnnnnnnnnnnnnnnnnnnnnnnnnnnnnnnnnnnnnnnnnnnnnnnnnnnnnnnnnnnnnnnnnnnnnnnnnnnnnnnnnnnnnnnnnnnnnnnnnnnnnnnnnnnnnnnnnnnnnnnnnnnnnnnnnnnnnnnnnnnnnnnnnnnnnnnnnnnnnnnnnnnnnnnnnnnnnnnnnnnnnnnnnnnnnnnnnnnnnnnnnnnnnnnnnnnnnnnnnnnnnnnnnnnnnnnnnnnnnnnnnnnnnnnnnnnnnnnnnnnnnnnnnnnnnnnnnnnnnnnnnnnnnnnnnnnnnnnnnnnnnnnnnnnnnnnnnnnnnnnnnnnnnnnnnnnnnnnnnnnnnnnnnnnnnnnnnnnnnnnnnnnnnnnnnnnnnnnnnnnnnnnnnnnnnnnnnnnnnnnnnnnnnnnnnnnnnnnnnnnnnnnnnnnnnnnnnnnnnnnnnnnnnnnnnnnnnnnnnnnnnnnnnnnnnnnnnnnnnnnnnnnnnnnnnnnnnnnnnnnnnnnnnnnnnnnnnnnnnnnnnnnnnnnnnnnnnnnnnnnnnnnnnnnnnnnnnnnnnnnnnnnnnnnnnnnnnnnnnnnnnnnnnnnnnnnnnnnnnnnnnnnnnnnnnnnnnnnnnnnnnnnnnnnnnnnnnnnnnnnnnnnnnnnnnnnnnnnnnnnnnnnnnnnnnnnnnnnnnnnnnnnnnnnnnnnnnnnnnnnnnnnnnnnnnnnnnnnnnnnnnnnnnnnnnnnnnnnnnnnnnnnnnnnnnnnnnnnnnnnnnnnnnnnnnnnnnnnnnnnnnnnnnnnnnnnnnnnnnnnnnnnnnnnnnnnnnnnnnnnnnnnnnnnnnnnnnnnnnnnnnnnnnnnnnnnnnnnnnnnnnnnnnnnnnnnnnnnnnnnnnnnnnnnnnnnnnnnnnnnnnnnnnnnnnnnnnnnnnnnnnnnnnnnnnnnnnnnnnnnnnnnnnnnnnnnnnnnnnnnnnnnnnnnnnnnnnnnnnnnnnnnnnnnnnnnnnnnnnnnnnnnnnnnnnnnnnnnnnnnnnnnnnnnnnnnnnnnnnnnnnnnnnnnnnnnnnnnnnnnnnnnnnnnnnnnnnnnnnnnnnnnnnnnnnnnnnnnnnnnnnnnnnnnnnnnnnnnnnnnnnnnnnnnnnnnnnnnnnnnnnnnnnnnnnnnnnnnnnnnnnnnnnnnnnnnnnnnnnnnnnnnnnnnnnnnnnnnnnnnnnnnnnnnnnnnnnnnnnnnnnnnnnnnnnnnnnnnnnnnnnnnnnnnnnnnnnnnnnnnnnnnnnnnnnnnnnnnnnnnnnnnnnnnnnnnnnnnnnnnnnnnnnnnnnnnnnnnnnnnnnnnnnnnnnnnnnnnnnnnnnnnnnnnnnnnnnnnnnnnnnnnnnnnnnnnnnnnnnnnnnnnnnnnnnnnnnnnnnnnnnnnnnnnnnnnnnnnnnnnnnnnnnnnnnnnnnnnnnnnnnnnnnnnnnnnnnnnnnnnnnnnnnnnnnnnnnnnnnnnnnnnnnnnnnnnnnnnnnnnnnnnnnnnnnnnnnnnnnnnnnnnnnnnnnnnnnnnnnnnnnnnnnnnnnnnnnnnnnnnnnnnnnnnnnnnnnnnnnnnnnnnnnnnnnnnnnnnnnnnnnnnnnnnnnnnnnnnnnnnnnnnnnnnnnnnnnnnnnnnnnnnnnnnnnnnnnnnnnnnnnnnnnnnnnnnnnnnnnnnnnnnnnnnnnnnnnnnnnnnnnnnnnnnnnnnnnnnnnnnnnnnnnnnnnnnnnnnnnnnnnnnnnnnnnnnnnnnnnnnnnnnnnnnnnnnnnnnnnnnnnnnnnnnnnnnnnnnnnnnnnnnnnnnnnnnnnnnnnnnnnnnnnnnnnnnnnnnnnnnnnnnnnnnnnnnnnnnnnnnnnnnnnnnnnnnnnnnnnnnnnnnnnnnnnnnnnnnnnnnnnnnnnnnnnnnnnnnnnnnnnnnnnnnnnnnnnnnnnnnnnnnnnnnnnnnnnnnnnnnnnnnnnnnnnnnnnnnnnnnnnnnnnnnnnnnnnnnnnnnnnnnnnnnnnnnnnnnnnnnnnnnnnnnnnnnnnnnnnnnnnnnnnnnnnnnnnnnnnnnnnnnnnnnnnnnnnnnnnnnnnnnnnnnnnnnnnnnnnnnnnnnnnnnnnnnnnnnnnnnnnnnnnnnnnnnnnnnnnnnnnnnnnnnnnnnnnnnnnnnnnnnnnnnnnnnnnnnnnnnnnnnnnnnnnnnnnnnnnnnnnnnnnnnnnnnnnnnnnnnnnnnnnnnnnnnnnnnnnnnnnnnnnnnnnnnnnnnnnnnnnnnnnnnnnnnnnnnnnnnnnnnnnnnnnnnnnnnnnnnnnnnnnnnnnnnnnnnnnnnnnnnnnnnnnnnnnnnnnnnnnnnnnnnnnnnnnnnnnnnnnnnnnnnnnnnnnnnnnnnnnnnnnnnnnnnnnnnnnnnnnnnnnnnnnnnnnnnnnnnnnnnnnnnnnnnnnnnnnnnnnnnnnnnnnnnnnnnnnnnnnnnnnnnnnnnnnnnnnnnnnnnnnnnnnnnnnnnnnnnnnnnnnnnnnnnnnnnnnnnnnnnnnnnnnnnnnnnnnnnnnnnnnnnnnnnnnnnnnnnnnnnnnnnnnnnnnnnnnnnnnnnnnnnnnnnnnnnnnnnnnnnnnnnnnnnnnnnnnnnnnnnnnnnnnnnnnnnnnnnnnnnnnnnnnnnnnnnnnnnnnnnnnnnnnnnnnnnnnnnnnnnnnnnnnnnnnnnnnnnnnnnnnnnnnnnnnnnnnnnnnnnnnnnnnnnnnnnnnnnnnnnnnnnnnnnnnnnnnnnnnnnnnnnnnnnnnnnnnnnnnnnnnnnnnnnnnnnnnnnnnnnnnnnnnnnnnnnnnnnnnnnnnnnnnnnnnnnnnnnnnnnnnnnnnnnnnnnnnnnnnnnnnnnnnnnnnnnnnnnnnnnnnnnnnnnnnnnnnnnnnnnnnnnnnnnnnnnnnnnnnnnnnnnnnnnnnnnnnnnnnnnnnnnnnnnnnnnnnnnnnnnnnnnnnnnnnnnnnnnnnnnnnnnnnnnnnnnnnnnnnnnnnnnnnnnnnnnnnnnnnnnnnnnnnnnnnnnnnnnnnnnnnnnnnnnnnnnnnnnnnnnnnnnnnnnnnnnnnnnnnnnnnnnnnnnnnnnnnnnnnnnnnnnnnnnnnnnnnnnnnnnnnnnnnnnnnnnnnnnnnnnnnnnnnnnnnnnnnnnnnnnnnnnnnnnnnnnnnnnnnnnnnnnnnnnnnnnnnnnnnnnnnnnnnnnnnnnnnnnnnnnnnnnnnnnnnnnnnnnnnnnnnnnnnnnnnnnnnnnnnnnnnnnnnnnnnnnnnnnnnnnnnnnnnnnnnnnnnnnnnnnnnnnnnnnnnnnnnnnnnnnnnnnnnnnnnnnnnnnnnnnnnnnnnnnnnnnnnnnnnnnnnnnnnnnnnnnnnnnnnnnnnnnnnnnnnnnnnnnnnnnnnnnnnnnnnnnnnnnnnnnnnnnnnnnnnnnnnnnnnnnnnnnnnnnnnnnnnnnnnnnnnnnnnnnnnnnnnnnnnnnnnnnnnnnnnnnnnnnnnnnnnnnnnnnnnnnnnnnnnnnnnnnnnnnnnnnnnnnnnnnnnnnnnnnnnnnnnnnnnnnnnnnnnnnnnnnnnnnnnnnnnnnnnnnnnnnnnnnnnnnnnnnnnnnnnnnnnnnnnnnnnnnnnnnnnnnnnnnnnnnnnnnnnnnnnnnnnnnnnnnnnnnnnnnnnnnnnnnnnnnnnnnnnnnnnnnnnnnnnnnnnnnnnnnnnnnnnnnnnnnnnnnnnnnnnnnnnnnnnnnnnnnnnnnnnnnnnnnnnnnnnnnnnnnnnnnnnnnnnnnnnnnnnnnnnnnnnnnnnnnnnnnnnnnnnnnnnnnnnnnnnnnnnnnnnnnnnnnnnnnnnnnnnnnnnnnnnnnnnnnnnnnnnnnnnnnnnnnnnnnnnnnnnnnnnnnnnnnnnnnnnnnnnnnnnnnnnnnnnnnnnnnnnnnnnnnnnnnnnnnnnnnnnnnnnnnnnnnnnnnnnnnnnnnnnnnnnnnnnnnnnnnnnnnnnnnnnnnnnnnnnnnnnnnnnnnnnnnnnnnnnnnnnnnnnnnnnnnnnnnnnnnnnnnnnnnnnnnnnnnnnnnnnnnnnnnnnnnnnnnnnnnnnnnnnnnnnnnnnnnnnnnnnnnnnnnnnnnnnnnnnnnnnnnnnnnnnnnnnnnnnnnnnnnnnnnnnnnnnnnnnnnnnnnnnnnnnnnnnnnnnnnnnnnnnnnnnnnnnnnnnnnnnnnnnnnnnnnnnnnnnnnnnnnnnnnnnnnnnnnnnnnnnnnnnnnnnnnnnnnnnnnnnnnnnnnnnnnnnnnnnnnnnnnnnnnnnnnnnnnnnnnnnnnnnnnnnnnnnnnnnnnnnnnnnnnnnnnnnnnnnnnnnnnnnnnnnnnnnnnnnnnnnnnnnnnnnnnnnnnnnnnnnnnnnnnnnnnnnnnnnnnnnnnnnnnnnnnnnnnnnnnnnnnnnnnnnnnnnnnnnnnnnnnnnnnnnnnnnnnnnnnnnnnnnnnnnnnnnnnnnnnnnnnnnnnnnnnnnnnnnnnnnnnnnnnnnnnnnnnnnnnnnnnnnnnnnnnnnnnnnnnnnnnnnnnnnnnnnnnnnnnnnnnnnnnnnnnnnnnnnnnnnnnnnnnnnnnnnnnnnnnnnnnnnnnnnnnnnnnnnnnnnnnnnnnnnnnnnnnnnnnnnnnnnnnnnnnnnnnnnnnnnnnnnnnnnnnnnnnnnnnnnnnnnnnnnnnnnnnnnnnnnnnnnnnnnnnnnnnnnnnnnnnnnnnnnnnnnnnnnnnnnnnnnnnnnnnnnnnnnnnnnnnnnnnnnnnnnnnnnnnnnnnnnnnnnnnnnnnnnnnnnnnnnnnnnnnnnnnnnnnnnnnnnnnnnnnnnnnnnnnnnnnnnnnnnnnnnnnnnnnnnnnnnnnnnnnnnnnnnnnnnnnnnnnnnnnnnnnnnnnnnnnnnnnnnnnnnnnnnnnnnnnnnnnnnnnnnnnnnnnnnnnnnnnnnnnnnnnnnnnnnnnnnnnnnnnnnnnnnnnnnnnnnnnnnnnnnnnnnnnnnnnnnnnnnnnnnnnnnnnnnnnnnnnnnnnnnnnnnnnnnnnnnnnnnnnnnnnnnnnnnnnnnnnnnnnnnnnnnnnnnnnnnnnnnnnnnnnnnnnnnnnnnnnnnnnnnnnnnnnnnnnnnnnnnnnnnnnnnnnnnnnnnnnnnnnnnnnnnnnnnnnnnnnnnnnnnnnnnnnnnnnnnnnnnnnnnnnnnnnnnnnnnnnnnnnnnnnnnnnnnnnnnnnnnnnnnnnnnnnnnnnnnnnnnnnnnnnnnnnnnnnnnnnnnnnnnnnnnnnnnnnnnnnnnnnnnnnnnnnnnnnnnnnnnnnnnnnnnnnnnnnnnnnnnnnnnnnnnnnnnnnnnnnnnnnnnnnnnnnnnnnnnnnnnnnnnnnnnnnnnnnnnnnnnnnnnnnnnnnnnnnnnnnnnnnnnnnnnnnnnnnnnnnnnnnnnnnnnnnnnnnnnnnnnnnnnnnnnnnnnnnnnnnnnnnnnnnnnnnnnnnnnnnnnnnnnnnnnnnnnnnnnnnnnnnnnnnnnnnnnnnnnnnnnnnnnnnnnnnnnnnnnnnnnnnnnnnnnnnnnnnnnnnnnnnnnnnnnnnnnnnnnnnnnnnnnnnnnnnnnnnnnnnnnnnnnnnnnnnnnnnnnnnnnnnnnnnnnnnnnnnnnnnnnnnnnnnnnnnnnnnnnnnnnnnnnnnnnnnnnnnnnnnnnnnnnnnnnnnnnnnnnnnnnnnnnnnnnnnnnnnnnnnnnnnnnnnnnnnnnnnnnnnnnnnnnnnnnnnnnnnnnnnnnnnnnnnnnnnnnnnnnnnnnnnnnnnnnnnnnnnnnnnnnnnnnnnnnnnnnnnnnnnnnnnnnnnnnnnnnnnnnnnnnnnnnnnnnnnnnnnnnnnnnnnnnnnnnnnnnnnnnnnnnnnnnnnnnnnnnnnnnnnnnnnnnnnnnnnnnnnnnnnnnnnnnnnnnnnnnnnnnnnnnnnnnnnnnnnnnnnnnnnnnnnnnnnnnnnnnnnnnnnnnnnnnnnnnnnnnnnnnnnnnnnnnnnnnnnnnnnnnnnnnnnnnnnnnnnnnnnnnnnnnnnnnnnnnnnnnnnnnnnnnnnnnnnnnnnnnnnnnnnnnnnnnnnnnnnnnnnnnnnnnnnnnnnnnnnnnnnnnnnnnnnnnnnnnnnnnnnnnnnnnnnnnnnnnnnnnnnnnnnnnnnnnnnnnnnnnnnnnnnnnnnnnnnnnnnnnnnnnnnnnnnnnnnnnnnnnnnnnnnnnnnnnnnnnnnnnnnnnnnnnnnnnnnnnnnnnnnnnnnnnnnnnnnnnnnnnnnnnnnnnnnnnnnnnnnnnnnnnnnnnnnnnnnnnnnnnnnnnnnnnnnnnnnnnnnnnnnnnnnnnnnnnnnnnnnnnnnnnnnnnnnnnnnnnnnnnnnnnnnnnnnnnnnnnnnnnnnnnnnnnnnnnnnnnnnnnnnnnnnnnnnnnnnnnnnnnnnnnnnnnnnnnnnnnnnnnnnnnnnnnnnnnnnnnnnnnnnnnnnnnnnnnnnnnnnnnnnnnnnnnnnnnnnnnnnnnnnnnnnnnnnnnnnnnnnnnnnnnnnnnnnnnnnnnnnnnnnnnnnnnnnnnnnnnnnnnnnnnnnnnnnnnnnnnnnnnnnnnnnnnnnnnnnnnnnnnnnnnnnnnnnnnnnnnnnnnnnnnnnnnnnnnnnnnnnnnnnnnnnnnnnnnnnnnnnnnnnnnnnnnnnnnnnnnnnnnnnnnnnnnnnnnnnnnnnnnnnnnnnnnnnnnnnnnnnnnnnnnnnnnnnnnnnnnnnnnnnnnnnnnnnnnnnnnnnnnnnnnnnnnnnnnnnnnnnnnnnnnnnnnnnnnnnnnnnnnnnnnnnnnnnnnnnnnnnnnnnnnnnnnnnnnnnnnnnnnnnnnnnnnnnnnnnnnnnnnnnnnnnnnnnnnnnnnnnnnnnnnnnnnnnnnnnnnnnnnnnnnnnnnnnnnnnnnnnnnnnnnnnnnnnnnnnnnnnnnnnnnnnnnnnnnnnnnnnnnnnnnnnnnnnnnnnnnnnnnnnnnnnnnnnnnnnnnnnnnnnnnnnnnnnnnnnnnnnnnnnnnnnnnnnnnnnnnnnnnnnnnnnnnnnnnnnnnnnnnnnnnnnnnnnnnnnnnnnnnnnnnnnnnnnnnnnnnnnnnnnnnnnnnnnnnnnnnnnnnnnnnnnnnnnnnnnnnnnnnnnnnnnnnnnnnnnnnnnnnnnnnnnnnnnnnnnnnnnnnnnnnnnnnnnnnnnnnnnnnnnnnnnnnnnnnnnnnnnnnnnnnnnnnnnnnnnnnnnnnnnnnnnnnnnnnnnnnnnnnnnnnnnnnnnnnnnnnnnnnnnnnnnnnnnnnnnnnnnnnnnnnnnnnnnnnnnnnnnnnnnnnnnnnnnnnnnnnnnnnnnnnnnnnnnnnnnnnnnnnnnnnnnnnnnnnnnnnnnnnnnnnnnnnnnnnnnnnnnnnnnnnnnnnnnnnnnnnnnnnnnnnnnnnnnnnnnnnnnnnnnnnnnnnnnnnnnnnnnnnnnnnnnnnnnnnnnnnnnnnnnnnnnnnnnnnnnnnnnnnnnnnnnnnnnnnnnnnnnnnnnnnnnnnnnnnnnnnnnnnnnnnnnnnnnnnnnnnnnnnnnnnnnnnnnnnnnnnnnnnnnnnnnnnnnnnnnnnnnnnnnnnnnnnnnnnnnnnnnnnnnnnnnnnnnnnnnnnnnnnnnnnnnnnnnnnnnnnnnnnnnnnnnnnnnnnnnnnnnnnnnnnnnnnnnnnnnnnnnnnnnnnnnnnnnnnnnnnnnnnnnnnnnnnnnnnnnnnnnnnnnnnnnnnnnnnnnnnnnnnnnnnnnnnnnnnnnnnnnnnnnnnnnnnnnnnnnnnnnnnnnnnnnnnnnnnnnnnnnnnnnnnnnnnnnnnnnnnnnnnnnnnnnnnnnnnnnnnnnnnnnnnnnnnnnnnnnnnnnnnnnnnnnnnnnnnnnnnnnnnnnnnnnnnnnnnnnnnnnnnnnnnnnnnnnnnnnnnnnnnnnnnnnnnnnnnnnnnnnnnnnnnnnnnnnnnnnnnnnnnnnnnnnnnnnnnnnnnnnnnnnnnnnnnnnnnnnnnnnnnnnnnnnnnnnnnnnnnnnnnnnnnnnnnnnnnnnnnnnnnnnnnnnnnnnnnnnnnnnnnnnnnnnnnnnnnnnnnnnnnnnnnnnnnnnnnnnnnnnnnnnnnnnnnnnnnnnnnnnnnnnnnnnnnnnnnnnnnnnnnnnnnnnnnnnnnnnnnnnnnnnnnnnnnnnnnnnnnnnnnnnnnnnnnnnnnnnnnnnnnnnnnnnnnnnnnnnnnnnnnnnnnnnnnnnnnnnnnnnnnnnnnnnnnnnnnnnnnnnnnnnnnnnnnnnnnnnnnnnnnnnnnnnnnnnnnnnnnnnnnnnnnnnnnnnnnnnnnnnnnnnnnnnnnnnnnnnnnnnnnnnnnnnnnnnnnnnnnnnnnnnnnnnnnnnnnnnnnnnnnnnnnnnnnnnnnnnnnnnnnnnnnnnnnnnnnnnnnnnnnnnnnnnnnnnnnnnnnnnnnnnnnnnnnnnnnnnnnnnnnnnnnnnnnnnnnnnnnnnnnnnnnnnnnnnnnnnnnnnnnnnnnnnnnnnnnnnnnnnnnnnnnnnnnnnnnnnnnnnnnnnnnnnnnnnnnnnnnnnnnnnnnnnnnnnnnnnnnnnnnnnnnnnnnnnnnnnnnnnnnnnnnnnnnnnnnnnnnnnnnnnnnnnnnnnnnnnnnnnnnnnnnnnnnnnnnnnnnnnnnnnnnnnnnnnnnnnnnnnnnnnnnnnnnnnnnnnnnnnnnnnnnnnnnnnnnnnnnnnnnnnnnnnnnnnnnnnnnnnnnnnnnnnnnnnnnnnnnnnnnnnnnnnnnnnnnnnnnnnnnnnnnnnnnnnnnnnnnnnnnnnnnnnnnnnnnnnnnnnnnnnnnnnnnnnnnnnnnnnnnnnnnnnnnnnnnnnnnnnnnnnnnnnnnnnnnnnnnnnnnnnnnnnnnnnnnnnnnnnnnnnnnnnnnnnnnnnnnnnnnnnnnnnnnnnnnnnnnnnnnnnnnnnnnnnnnnnnnnnnnnnnnnnnnnnnnnnnnnnnnnnnnnnnnnnnnnnnnnnnnnnnnnnnnnnnnnnnnnnnnnnnnnnnnnnnnnnnnnnnnnnnnnnnnnnnnnnnnnnnnnnnnnnnnnnnnnnnnnnnnnnnnnnnnnnnnnnnnnnnnnnnnnnnnnnnnnnnnnnnnnnnnnnnnnnnnnnnnnnnnnnnnnnnnnnnnnnnnnnnnnnnnnnnnnnnnnnnnnnnnnnnnnnnnnnnnnnnnnnnnnnnnnnnnnnnnnnnnnnnnnnnnnnnnnnnnnnnnnnnnnnnnnnnnnnnnnnnnnnnnnnnnnnnnnnnnnnnnnnnnnnnnnnnnnnnnnnnnnnnnnnnnnnnnnnnnnnnnnnnnnnnnnnnnnnnnnnnnnnnnnnnnnnnnnnnnnnnnnnnnnnnnnnnnnnnnnnnnnnnnnnnnnnnnnnnnnnnnnnnnnnnnnnnnnnnnnnnnnnnnnnnnnnnnnnnnnnnnnnnnnnnnnnnnnnnnnnnnnnnnnnnnnnnnnnnnnnnnnnnnnnnnnnnnnnnnnnnnnnnnnnnnnnnnnnnnnnnnnnnnnnnnnnnnnnnnnnnnnnnnnnnnnnnnnnnnnnnnnnnnnnnnnnnnnnnnnnnnnnnnnnnnnnnnnnnnnnnnnnnnnnnnnnnnnnnnnnnnnnnnnnnnnnnnnnnnnnnnnnnnnnnnnnnnnnnnnnnnnnnnnnnnnnnnnnnnnnnnnnnnnnnnnnnnnnnnnnnnnnnnnnnnnnnnnnnnnnnnnnnnnnnnnnnnnnnnnnnnnnnnnnnnnnnnnnnnnnnnnnnnnnnnnnnnnnnnnnnnnnnnnnnnnnnnnnnnnnnnnnnnnnnnnnnnnnnnnnnnnnnnnnnnnnnnnnnnnnnnnnnnnnnnnnnnnnnnnnnnnnnnnnnnnnnnnnnnnnnnnnnnnnnnnnnnnnnnnnnnnnnnnnnnnnnnnnnnnnnnnnnnnnnnnnnnnnnnnnnnnnnnnnnnnnnnnnnnnnnnnnnnnnnnnnnnnnnnnnnnnnnnnnnnnnnnnnnnnnnnnnnnnnnnnnnnnnnnnnnnnnnnnnnnnnnnnnnnnnnnnnnnnnnnnnnnnnnnnnnnnnnnnnnnnnnnnnnnnnnnnnnnnnnnnnnnnnnnnnnnnnnnnnnnnnnnnnnnnnnnnnnnnnnnnnnnnnnnnnnnnnnnnnnnnnnnnnnnnnnnnnnnnnnnnnnnnnnnnnnnnnnnnnnnnnnnnnnnnnnnnnnnnnnnnnnnnnnnnnnnnnnnnnnnnnnnnnnnnnnnnnnnnnnnnnnnnnnnnnnnnnnnnnnnnnnnnnnnnnnnnnnnnnnnnnnnnnnnnnnnnnnnnnnnnnnnnnnnnnnnnnnnnnnnnnnnnnnnnnnnnnnnnnnnnnnnnnnnnnnnnnnnnnnnnnnnnnnnnnnnnnnnnnnnnnnnnnnnnnnnnnnnnnnnnnnnnnnnnnnnnnnnnnnnnnnnnnnnnnnnnnnnnnnnnnnnnnnnnnnnnnnnnnnnnnnnnnnnnnnnnnnnnnnnnnnnnnnnnnnnnnnnnnnnnnnnnnnnnnnnnnnnnnnnnnnnnnnnnnnnnnnnnnnnnnnnnnnnnnnnnnnnnnnnnnnnnnnnnnnnnnnnnnnnnnnnnnnnnnnnnnnnnnnnnnnnnnnnnnnnnnnnnnnnnnnnnnnnnnnnnnnnnnnnnnnnnnnnnnnnnnnnnnnnnnnnnnnnnnnnnnnnnnnnnnnnnnnnnnnnnnnnnnnnnnnnnnnnnnnnnnnnnnnnnnnnnnnnnnnnnnnnnnnnnnnnnnnnnnnnnnnnnnnnnnnnnnnnnnnnnnnnnnnnnnnnnnnnnnnnnnnnnnnnnnnnnnnnnnnnnnnnnnnnnnnnnnnnnnnnnnnnnnnnnnnnnnnnnnnnnnnnnnnnnnnnnnnnnnnnnnnnnnnnnnnnnnnnnnnnnnnnnnnnnnnnnnnnnnnnnnnnnnnnnnnnnnnnnnnnnnnnnnnnnnnnnnnnnnnnnnnnnnnnnnnnnnnnnnnnnnnnnnnnnnnnnnnnnnnnnnnnnnnnnnnnnnnnnnnnnnnnnnnnnnnnnnnnnnnnnnnnnnnnnnnnnnnnnnnnnnnnnnnnnnnnnnnnnnnnnnnnnnnnnnnnnnnnnnnnnnnnnnnnnnnnnnnnnnnnnnnnnnnnnnnnnnnnnnnnnnnnnnnnnnnnnnnnnnnnnnnnnnnnnnnnnnnnnnnnnnnnnnnnnnnnnnnnnnnnnnnnnnnnnnnnnnnnnnnnnnnnnnnnnnnnnnnnnnnnnnnnnnnnnnnnnnnnnnnnnnnnnnnnnnnnnnnnnnnnnnnnnnnnnnnnnnnnnnnnnnnnnnnnnnnnnnnnnnnnnnnnnnnnnnnnnnnnnnnnnnnnnnnnnnnnnnnnnnnnnnnnnnnnnnnnnnnnnnnnnnnnnnnnnnnnnnnnnnnnnnnnnnnnnnnnnnnnnnnnnnnnnnnnnnnnnnnnnnnnnnnnnnnnnnnnnnnnnnnnnnnnnnnnnnnnnnnnnnnnnnnnnnnnnnnnnnnnnnnnnnnnnnnnnnnnnnnnnnnnnnnnnnnnnnnnnnnnnnnnnnnnnnnnnnnnnnnnnnnnnnnnnnnnnnnnnnnnnnnnnnnnnnnnnnnnnnnnnnnnnnnnnnnnnnnnnnnnnnnnnnnnnnnnnnnnnnnnnnnnnnnnnnnnnnnnnnnnnnnnnnnnnnnnnnnnnnnnnnnnnnnnnnnnnnnnnnnnnnnnnnnnnnnnnnnnnnnnnnnnnnnnnnnnnnnnnnnnnnnnnnnnnnnnnnnnnnnnnnnnnnnnnnnnnnnnnnnnnnnnnnnnnnnnnnnnnnnnnnnnnnnnnnnnnnnnnnnnnnnnnnnnnnnnnnnnnnnnnnnnnnnnnnnnnnnnnnnnnnnnnnnnnnnnnnnnnnnnnnnnnnnnnnnnnnnnnnnnnnnnnnnnnnnnnnnnnnnnnnnnnnnnnnnnnnnnnnnnnnnnnnnnnnnnnnnnnnnnnnnnnnnnnnnnnnnnnnnnnnnnnnnnnnnnnnnnnnnnnnnnnnnnnnnnnnnnnnnnnnnnnnnnnnnnnnnnnnnnnnnnnnnnnnnnnnnnnnnnnnnnnnnnnnnnnnnnnnnnnnnnnnnnnnnnnnnnnnnnnnnnnnnnnnnnnnnnnnnnnnnnnnnnnnnnnnnnnnnnnnnnnnnnnnnnnnnnnnnnnnnnnnnnnnnnnnnnnnnnnnnnnnnnnnnnnnnnnnnnnnnnnnnnnnnnnnnnnnnnnnnnnnnnnnnnnnnnnnnnnnnnnnnnnnnnnnnnnnnnnnnnnnnnnnnnnnnnnnnnnnnnnnnnnnnnnnnnnnnnnnnnnnnnnnnnnnnnnnnnnnnnnnnnnnnnnnnnnnnnnnnnnnnnnnnnnnnnnnnnnnnnnnnnnnnnnnnnnnnnnnnnnnnnnnnnnnnnnnnnnnnnnnnnnnnnnnnnnnnnnnnnnnnnnnnnnnnnnnnnnnnnnnnnnnnnnnnnnnnnnnnnnnnnnnnnnnnnnnnnnnnnnnnnnnnnnnnnnnnnnnnnnnnnnnnnnnnnnnnnnnnnnnnnnnnnnnnnnnnnnnnnnnnnnnnnnnnnnnnnnnnnnnnnnnnnnnnnnnnnnnnnnnnnnnnnnnnnnnnnnnnnnnnnnnnnnnnnnnnnnnnnnnnnnnnnnnnnnnnnnnnnnnnnnnnnnnnnnnnnnnnnnnnnnnnnnnnnnnnnnnnnnnnnnnnnnnnnnnnnnnnnnnnnnnnnnnnnnnnnnnnnnnnnnnnnnnnnnnnnnnnnnnnnnnnnnnnnnnnnnnnnnnnnnnnnnnnnnnnnnnnnnnnnnnnnnnnnnnnnnnnnnnnnnnnnnnnnnnnnnnnnnnnnnnnnnnnnnnnnnnnnnnnnnnnnnnnnnnnnnnnnnnnnnnnnnnnnnnnnnnnnnnnnnnnnnnnnnnnnnnnnnnnnnnnnnnnnnnnnnnnnnnnnnnnnnnnnnnnnnnnnnnnnnnnnnnnnnnnnnnnnnnnnnnnnnnnnnnnnnnnnnnnnnnnnnnnnnnnnnnnnnnnnnnnnnnnnnnnnnnnnnnnnnnnnnnnnnnnnnnnnnnnnnnnnnnnnnnnnnnnnnnnnnnnnnnnnnnnnnnnnnnnnnnnnnnnnnnnnnnnnnnnnnnnnnnnnnnnnnnnnnnnnnnnnnnnnnnnnnnnnnnnnnnnnnnnnnnnnnnnnnnnnnnnnnnnnnnnnnnnnnnnnnnnnnnnnnnnnnnnnnnnnnnnnnnnnnnnnnnnnnnnnnnnnnnnnnnnnnnnnnnnnnnnnnnnnnnnnnnnnnnnnnnnnnnnnnnnnnnnnnnnnnnnnnnnnnnnnnnnnnnnnnnnnnnnnnnnnnnnnnnnnnnnnnnnnnnnnnnnnnnnnnnnnnnnnnnnnnnnnnnnnnnnnnnnnnnnnnnnnnnnnnnnnnnnnnnnnnnnnnnnnnnnnnnnnnnnnnnnnnnnnnnnnnnnnnnnnnnnnnnnnnnnnnnnnnnnnnnnnnnnnnnnnnnnnnnnnnnnnnnnnnnnnnnnnnnnnnnnnnnnnnnnnnnnnnnnnnnnnnnnnnnnnnnnnnnnnnnnnnnnnnnnnnnnnnnnnnnnnnnnnnnnnnnnnnnnnnnnnnnnnnnnnnnnnnnnnnnnnnnnnnnnnnnnnnnnnnnnnnnnnnnnnnnnnnnnnnnnnnnnnnnnnnnnnnnnnnnnnnnnnnnnnnnnnnnnnnnnnnnnnnnnnnnnnnnnnnnnnnnnnnnnnnnnnnnnnnnnnnnnnnnnnnnnnnnnnnnnnnnnnnnnnnnnnnnnnnnnnnnnnnnnnnnnnnnnnnnnnnnnnnnnnnnnnnnnnnnnnnnnnnnnnnnnnnnnnnnnnnnnnnnnnnnnnnnnnnnnnnnnnnnnnnnnnnnnnnnnnnnnnnnnnnnnnnnnnnnnnnnnnnnnnnnnnnnnnnnnnnnnnnnnnnnnnnnnnnnnnnnnnnnnnnnnnnnnnnnnnnnnnnnnnnnnnnnnnnnnnnnnnnnnnnnnnnnnnnnnnnnnnnnnnnnnnnnnnnnnnnnnnnnnnnnnnnnnnnnnnnnnnnnnnnnnnnnnnnnnnnnnnnnnnnnnnnnnnnnnnnnnnnnnnnnnnnnnnnnnnnnnnnnnnnnnnnnnnnnnnnnnnnnnnnnnnnnnnnnnnnnnnnnnnnnnnnnnnnnnnnnnnnnnnnnnnnnnnnnnnnnnnnnnnnnnnnnnnnnnnnnnnnnnnnnnnnnnnnnnnnnnnnnnnnnnnnnnnnnnnnnnnnnnnnnnnnnnnnnnnnnnnnnnnnnnnnnnnnnnnnnnnnnnnnnnnnnnnnnnnnnnnnnnnnnnnnnnnnnnnnnnnnnnnnnnnnnnnnnnnnnnnnnnnnnnnnnnnnnnnnnnnnnnnnnnnnnnnnnnnnnnnnnnnnnnnnnnnnnnnnnnnnnnnnnnnnnnnnnnnnnnnnnnnnnnnnnnnnnnnnnnnnnnnnnnnnnnnnnnnnnnnnnnnnnnnnnnnnnnnnnnnnnnnnnnnnnnnnnnnnnnnnnnnnnnnnnnnnnnnnnnnnnnnnnnnnnnnnnnnnnnnnnnnnnnnnnnnnnnnnnnnnnnnnnnnnnnnnnnnnnnnnnnnnnnnnnnnnnnnnnnnnnnnnnnnnnnnnnnnnnnnnnnnnnnnnnnnnnnnnnnnnnnnnnnnnnnnnnnnnnnnnnnnnnnnnnnnnnnnnnnnnnnnnnnnnnnnnnnnnnnnnnnnnnnnnnnnnnnnnnnnnnnnnnnnnnnnnnnnnnnnnnnnnnnnnnnnnnnnnnnnnnnnnnnnnnnnnnnnnnnnnnnnnnnnnnnnnnnnnnnnnnnnnnnnnnnnnnnnnnnnnnnnnnnnnnnnnnnnnnnnnnnnnnnnnnnnnnnnnnnnnnnnnnnnnnnnnnnnnnnnnnnnnnnnnnnnnnnnnnnnnnnnnnnnnnnnnnnnnnnnnnnnnnnnnnnnnnnnnnnnnnnnnnnnnnnnnnnnnnnnnnnnnnnnnnnnnnnnnnnnnnnnnnnnnnnnnnnnnnnnnnnnnnnnnnnnnnnnnnnnnnnnnnnnnnnnnnnnnnnnnnnnnnnnnnnnnnnnnnnnnnnnnnnnnnnnnnnnnnnnnnnnnnnnnnnnnnnnnnnnnnnnnnnnnnnnnnnnnnnnnnnnnnnnnnnnnnnnnnnnnnnnnnnnnnnnnnnnnnnnnnnnnnnnnnnnnnnnnnnnnnnnnnnnnnnnnnnnnnnnnnnnnnnnnnnnnnnnnnnnnnnnnnnnnnnnnnnnnnnnnnnnnnnnnnnnnnnnnnnnnnnnnnnnnnnnnnnnnnnnnnnnnnnnnnnnnnnnnnnnnnnnnnnnnnnnnnnnnnnnnnnnnnnnnnnnnnnnnnnnnnnnnnnnnnnnnnnnnnnnnnnnnnnnnnnnnnnnnnnnnnnnnnnnnnnnnnnnnnnnnnnnnnnnnnnnnnnnnnnnnnnnnnnnnnnnnnnnnnnnnnnnnnnnnnnnnnnnnnnnnnnnnnnnnnnnnnnnnnnnnnnnnnnnnnnnnnnnnnnnnnnnnnnnnnnnnnnnnnnnnnnnnnnnnnnnnnnnnnnnnnnnnnnnnnnnnnnnnnnnnnnnnnnnnnnnnnnnnnnnnnnnnnnnnnnnnnnnnnnnnnnnnnnnnnnnnnnnnnnnnnnnnnnnnnnnnnnnnnnnnnnnnnnnnnnnnnnnnnnnnnnnnnnnnnnnnnnnnnnnnnnnnnnnnnnnnnnnnnnnnnnnnnnnnnnnnnnnnnnnnnnnnnnnnnnnnnnnnnnnnnnnnnnnnnnnnnnnnnnnnnnnnnnnnnnnnnnnnnnnnnnnnnnnnnnnnnnnnnnnnnnnnnnnnnnnnnnnnnnnnnnnnnnnnnnnnnnnnnnnnnnnnnnnnnnnnnnnnnnnnnnnnnnnnnnnnnnnnnnnnnnnnnnnnnnnnnnnnnnnnnnnnnnnnnnnnnnnnnnnnnnnnnnnnnnnnnnnnnnnnnnnnnnnnnnnnnnnnnnnnnnnnnnnnnnnnnnnnnnnnnnnnnnnnnnnnnnnnnnnnnnnnnnnnnnnnnnnnnnnnnnnnnnnnnnnnnnnnnnnnnnnnnnnnnnnnnnnnnnnnnnnnnnnnnnnnnnnnnnnnnnnnnnnnnnnnnnnnnnnnnnnnnnnnnnnnnnnnnnnnnnnnnnnnnnnnnnnnnnnnnnnnnnnnnnnnnnnnnnnnnnnnnnnnnnnnnnnnnnnnnnnnnnnnnnnnnnnnnnnnnnnnnnnnnnnnnnnnnnnnnnnnnnnnnnnnnnnnnnnnnnnnnnnnnnnnnnnnnnnnnnnnnnnnnnnnnnnnnnnnnnnnnnnnnnnnnnnnnnnnnnnnnnnnnnnnnnnnnnnnnnnnnnnnnnnnnnnnnnnnnnnnnnnnnnnnnnnnnnnnnnnnnnnnnnnnnnnnnnnnnnnnnnnnnnnnnnnnnnnnnnnnnnnnnnnnnnnnnnnnnnnnnnnnnnnnnnnnnnnnnnnnnnnnnnnnnnnnnnnnnnnnnnnnnnnnnnnnnnnnnnnnnnnnnnnnnnnnnnnnnnnnnnnnnnnnnnnnnnnnnnnnnnnnnnnnnnnnnnnnnnnnnnnnnnnnnnnnnnnnnnnnnnnnnnnnnnnnnnnnnnnnnnnnnnnnnnnnnnnnnnnnnnnnnnnnnnnnnnnnnnnnnnnnnnnnnnnnnnnnnnnnnnnnnnnnnnnnnnnnnnnnnnnnnnnnnnnnnnnnnnnnnnnnnnnnnnnnnnnnnnnnnnnnnnnnnnnnnnnnnnnnnnnnnnnnnnnnnnnnnnnnnnnnnnnnnnnnnnnnnnnnnnnnnnnnnnnnnnnnnnnnnnnnnnnnnnnnnnnnnnnnnnnnnnnnnnnnnnnnnnnnnnnnnnnnnnnnnnnnnnnnnnnnnnnnnnnnnnnnnnnnnnnnnnnnnnnnnnnnnnnnnnnnnnnnnnnnnnnnnnnnnnnnnnnnnnnnnnnnnnnnnnnnnnnnnnnnnnnnnnnnnnnnnnnnnnnnnnnnnnnnnnnnnnnnnnnnnnnnnnnnnnnnnnnnnnnnnnnnnnnnnnnnnnnnnnnnnnnnnnnnnnnnnnnnnnnnnnnnnnnnnnnnnnnnnnnnnnnnnnnnnnnnnnnnnnnnnnnnnnnnnnnnnnnnnnnnnnnnnnnnnnnnnnnnnnnnnnnnnnnnnnnnnnnnnnnnnnnnnnnnnnnnnnnnnnnnnnnnnnnnnnnnnnnnnnnnnnnnnnnnnnnnnnnnnnnnnnnnnnnnnnnnnnnnnnnnnnnnnnnnnnnnnnnnnnnnnnnnnnnnnnnnnnnnnnnnnnnnnnnnnnnnnnnnnnnnnnnnnnnnnnnnnnnnnnnnnnnnnnnnnnnnnnnnnnnnnnnnnnnnnnnnnnnnnnnnnnnnnnnnnnnnnnnnnnnnnnnnnnnnnnnnnnnnnnnnnnnnnnnnnnnnnnnnnnnnnnnnnnnnnnnnnnnnnnnnnnnnnnnnnnnnnnnnnnnnnnnnnnnnnnnnnnnnnnnnnnnnnnnnnnnnnnnnnnnnnnnnnnnnnnnnnnnnnnnnnnnnnnnnnnnnnnnnnnnnnnnnnnnnnnnnnnnnnnnnnnnnnnnnnnnnnnnnnnnnnnnnnnnnnnnnnnnnnnnnnnnnnnnnnnnnnnnnnnnnnnnnnnnnnnnnnnnnnnnnnnnnnnnnnnnnnnnnnnnnnnnnnnnnnnnnnnnnnnnnnnnnnnnnnnnnnnnnnnnnnnnnnnnnnnnnnnnnnnnnnnnnnnnnnnnnnnnnnnnnnnnnnnnnnnnnnnnnnnnnnnnnnnnnnnnnnnnnnnnnnnnnnnnnnnnnnnnnnnnnnnnnnnnnnnnnnnnnnnnnnnnnnnnnnnnnnnnnnnnnnnnnnnnnnnnnnnnnnnnnnnnnnnnnnnnnnnnnnnnnnnnnnnnnnnnnnnnnnnnnnnnnnnnnnnnnnnnnnnnnnnnnnnnnnnnnnnnnnnnnnnnnnnnnnnnnnnnnnnnnnnnnnnnnnnnnnnnnnnnnnnnnnnnnnnnnnnnnnnnnnnnnnnnnnnnnnnnnnnnnnnnnnnnnnnnnnnnnnnnnnnnnnnnnnnnnnnnnnnnnnnnnnnnnnnnnnnnnnnnnnnnnnnnnnnnnnnnnnnnnnnnnnnnnnnnnnnnnnnnnnnnnnnnnnnnnnnnnnnnnnnnnnnnnnnnnnnnnnnnnnnnnnnnnnnnnnnnnnnnnnnnnnnnnnnnnnnnnnnnnnnnnnnnnnnnnnnnnnnnnnnnnnnnnnnnnnnnnnnnnnnnnnnnnnnnnnnnnnnnnnnnnnnnnnnnnnnnnnnnnnnnnnnnnnnnnnnnnnnnnnnnnnnnnnnnnnnnnnnnnnnnnnnnnnnnnnnnnnnnnnnnnnnnnnnnnnnnnnnnnnnnnnnnnnnnnnnnnnnnnnnnnnnnnnnnnnnnnnnnnnnnnnnnnnnnnnnnnnnnnnnnnnnnnnnnnnnnnnnnnnnnnnnnnnnnnnnnnnnnnnnnnnnnnnnnnnnnnnnnnnnnnnnnnnnnnnnnnnnnnnnnnnnnnnnnnnnnnnnnnnnnnnnnnnnnnnnnnnnnnnnnnnnnnnnnnnnnnnnnnnnnnnnnnnnnnnnnnnnnnnnnnnnnnnnnnnnnnnnnnnnnnnnnnnnnnnnnnnnnnnnnnnnnnnnnnnnnnnnnnnnnnnnnnnnnnnnnnnnnnnnnnnnnnnnnnnnnnnnnnnnnnnnnnnnnnnnnnnnnnnnnnnnnnnnnnnnnnnnnnnnnnnnnnnnnnnnnnnnnnnnnnnnnnnnnnnnnnnnnnnnnnnnnnnnnnnnnnnnnnnnnnnnnnnnnnnnnnnnnnnnnnnnnnnnnnnnnnnnnnnnnnnnnnnnnnnnnnnnnnnnnnnnnnnnnnnnnnnnnnnnnnnnnnnnnnnnnnnnnnnnnnnnnnnnnnnnnnnnnnnnnnnnnnnnnnnnnnnnnnnnnnnnnnnnnnnnnnnnnnnnnnnnnnnnnnnnnnnnnnnnnnnnnnnnnnnnnnnnnnnnnnnnnnnnnnnnnnnnnnnnnnnnnnnnnnnnnnnnnnnnnnnnnnnnnnnnnnnnnnnnnnnnnnnnnnnnnnnnnnnnnnnnnnnnnnnnnnnnnnnnnnnnnnnnnnnnnnnnnnnnnnnnnnnnnnnnnnnnnnnnnnnnnnnnnnnnnnnnnnnnnnnnnnnnnnnnnnnnnnnnnnnnnnnnnnnnnnnnnnnnnnnnnnnnnnnnnnnnnnnnnnnnnnnnnnnnnnnnnnnnnnnnnnnnnnnnnnnnnnnnnnnnnnnnnnnnnnnnnnnnnnnnnnnnnnnnnnnnnnnnnnnnnnnnnnnnnnnnnnnnnnnnnnnnnnnnnnnnnnnnnnnnnnnnnnnnnnnnnnnnnnnnnnnnnnnnnnnnnnnnnnnnnnnnnnnnnnnnnnnnnnnnnnnnnnnnnnnnnnnnnnnnnnnnnnnnnnnnnnnnnnnnnnnnnnnnnnnnnnnnnnnnnnnnnnnnnnnnnnnnnnnnnnnnnnnnnnnnnnnnnnnnnnnnnnnnnnnnnnnnnnnnnnnnnnnnnnnnnnnnnnnnnnnnnnnnnnnnnnnnnnnnnnnnnnnnnnnnnnnnnnnnnnnnnnnnnnnnnnnnnnnnnnnnnnnnnnnnnnnnnnnnnnnnnnnnnnnnnnnnnnnnnnnnnnnnnnnnnnnnnnnnnnnnnnnnnnnnnnnnnnnnnnnnnnnnnnnnnnnnnnnnnnnnnnnnnnnnnnnnnnnnnnnnnnnnnnnnnnnnnnnnnnnnnnnnnnnnnnnnnnnnnnnnnnnnnnnnnnnnnnnnnnnnnnnnnnnnnnnnnnnnnnnnnnnnnnnnnnnnnnnnnnnnnnnnnnnnnnnnnnnnnnnnnnnnnnnnnnnnnnnnnnnnnnnnnnnnnnnnnnnnnnnnnnnnnnnnnnnnnnnnnnnnnnnnnnnnnnnnnnnnnnnnnnnnnnnnnnnnnnnnnnnnnnnnnnnnnnnnnnnnnnnnnnnnnnnnnnnnnnnnnnnnnnnnnnnnnnnnnnnnnnnnnnnnnnnnnnnnnnnnnnnnnnnnnnnnnnnnnnnnnnnnnnnnnnnnnnnnnnnnnnnnnnnnnnnnnnnnnnnnnnnnnnnnnnnnnnnnnnnnnnnnnnnnnnnnnnnnnnnnnnnnnnnnnnnnnnnnnnnnnnnnnnnnnnnnnnnnnnnnnnnnnnnnnnnnnnnnnnnnnnnnnnnnnnnnnnnnnnnnnnnnnnnnnnnnnnnnnnnnnnnnnnnnnnnnnnnnnnnnnnnnnnnnnnnnnnnnnnnnnnnnnnnnnnnnnnnnnnnnnnnnnnnnnnnnnnnnnnnnnnnnnnnnnnnnnnnnnnnnnnnnnnnnnnnnnnnnnnnnnnnnnnnnnnnnnnnnnnnnnnnnnnnnnnnnnnnnnnnnnnnnnnnnnnnnnnnnnnnnnnnnnnnnnnnnnnnnnnnnnnnnnnnnnnnnnnnnnnnnnnnnnnnnnnnnnnnnnnnnnnnnnnnnnnnnnnnnnnnnnnnnnnnnnnnnnnnnnnnnnnnnnnnnnnnnnnnnnnnnnnnnnnnnnnnnnnnnnnnnnnnnnnnnnnnnnnnnnnnnnnnnnnnnnnnnnnnnnnnnnnnnnnnnnnnnnnnnnnnnnnnnnnnnnnnnnnnnnnnnnnnnnnnnnnnnnnnnnnnnnnnnnnnnnnnnnnnnnnnnnnnnnnnnnnnnnnnnnnnnnnnnnnnnnnnnnnnnnnnnnnnnnnnnnnnnnnnnnnnnnnnnnnnnnnnnnnnnnnnnnnnnnnnnnnnnnnnnnnnnnnnnnnnnnnnnnnnnnnnnnnnnnnnnnnnnnnnnnnnnnnnnnnnnnnnnnnnnnnnnnnnnnnnnnnnnnnnnnnnnnnnnnnnnnnnnnnnnnnnnnnnnnnnnnnnnnnnnnnnnnnnnnnnnnnnnnnnnnnnnnnnnnnnnnnnnnnnnnnnnnnnnnnnnnnnnnnnnnnnnnnnnnnnnnnnnnnnnnnnnnnnnnnnnnnnnnnnnnnnnnnnnnnnnnnnnnnnnnnnnnnnnnnnnnnnnnnnnnnnnnnnnnnnnnnnnnnnnnnnnnnnnnnnnnnnnnnnnnnnnnnnnnnnnnnnnnnnnnnnnnnnnnnnnnnnnnnnnnnnnnnnnnnnnnnnnnnnnnnnnnnnnnnnnnnnnnnnnnnnnnnnnnnnnnnnnnnnnnnnnnnnnnnnnnnnnnnnnnnnnnnnnnnnnnnnnnnnnnnnnnnnnnnnnnnnnnnnnnnnnnnnnnnnnnnnnnnnnnnnnnnnnnnnnnnnnnnnnnnnnnnnnnnnnnnnnnnnnnnnnnnnnnnnnnnnnnnnnnnnnnnnnnnnnnnnnnnnnnnnnnnnnnnnnnnnnnnnnnnnnnnnnnnnnnnnnnnnnnnnnnnnnnnnnnnnnnnnnnnnnnnnnnnnnnnnnnnnnnnnnnnnnnnnnnnnnnnnnnnnnnnnnnnnnnnnnnnnnnnnnnnnnnnnnnnnnnnnnnnnnnnnnnnnnnnnnnnnnnnnnnnnnnnnnnnnnnnnnnnnnnnnnnnnnnnnnnnnnnnnnnnnnnnnnnnnnnnnnnnnnnnnnnnnnnnnnnnnnnnnnnnnnnnnnnnnnnnnnnnnnnnnnnnnnnnnnnnnnnnnnnnnnnnnnnnnnnnnnnnnnnnnnnnnnnnnnnnnnnnnnnnnnnnnnnnnnnnnnnnnnnnnnnnnnnnnnnnnnnnnnnnnnnnnnnnnnnnnnnnnnnnnnnnnnnnnnnnnnnnnnnnnnnnnnnnnnnnnnnnnnnnnnnnnnnnnnnnnnnnnnnnnnnnnnnnnnnnnnnnnnnnnnnnnnnnnnnnnnnnnnnnnnnnnnnnnnnnnnnnnnnnnnnnnnnnnnnnnnnnnnnnnnnnnnnnnnnnnnnnnnnnnnnnnnnnnnnnnnnnnnnnnnnnnnnnnnnnnnnnnnnnnnnnnnnnnnnnnnnnnnnnnnnnnnnnnnnnnnnnnnnnnnnnnnnnnnnnnnnnnnnnnnnnnnnnnnnnnnnnnnnnnnnnnnnnnnnnnnnnnnnnnnnnnnnnnnnnnnnnnnnnnnnnnnnnnnnnnnnnnnnnnnnnnnnnnnnnnnnnnnnnnnnnnnnnnnnnnnnnnnnnnnnnnnnnnnnnnnnnnnnnnnnnnnnnnnnnnnnnnnnnnnnnnnnnnnnnnnnnnnnnnnnnnnnnnnnnnnnnnnnnnnnnnnnnnnnnnnnnnnnnnnnnnnnnnnnnnnnnnnnnnnnnnnnnnnnnnnnnnnnnnnnnnnnnnnnnnnnnnnnnnnnnnnnnnnnnnnnnnnnnnnnnnnnnnnnnnnnnnnnnnnnnnnnnnnnnnnnnnnnnnnnnnnnnnnnnnnnnnnnnnnnnnnnnnnnnnnnnnnnnnnnnnnnnnnnnnnnnnnnnnnnnnnnnnnnnnnnnnnnnnnnnnnnnnnnnnnnnnnnnnnnnnnnnnnnnnnnnnnnnnnnnnnnnnnnnnnnnnnnnnnnnnnnnnnnnnnnnnnnnnnnnnnnnnnnnnnnnnnnnnnnnnnnnnnnnnnnnnnnnnnnnnnnnnnnnnnnnnnnnnnnnnnnnnnnnnnnnnnnnnnnnnnnnnnnnnnnnnnnnnnnnnnnnnnnnnnnnnnnnnnnnnnnnnnnnnnnnnnnnnnnnnnnnnnnnnnnnnnnnnnnnnnnnnnnnnnnnnnnnnnnnnnnnnnnnnnnnnnnnnnnnnnnnnnnnnnnnnnnnnnnnnnnnnnnnnnnnnnnnnnnnnnnnnnnnnnnnnnnnnnnnnnnnnnnnnnnnnnnnnnnnnnnnnnnnnnnnnnnnnnnnnnnnnnnnnnnnnnnnnnnnnnnnnnnnnnnnnnnnnnnnnnnnnnnnnnnnnnnnnnnnnnnnnnnnnnnnnnnnnnnnnnnnnnnnnnnnnnnnnnnnnnnnnnnnnnnnnnnnnnnnnnnnnnnnnnnnnnnnnnnnnnnnnnnnnnnnnnnnnnnnnnnnnnnnnnnnnnnnnnnnnnnnnnnnnnnnnnnnnnnnnnnnnnnnnnnnnnnnnnnnnnnnnnnnnnnnnnnnnnnnnnnnnnnnnnnnnnnnnnnnnnnnnnnnnnnnnnnnnnnnnnnnnnnnnnnnnnnnnnnnnnnnnnnnnnnnnnnnnnnnnnnnnnnnnnnnnnnnnnnnnnnnnnnnnnnnnnnnnnnnnnnnnnnnnnnnnnnnnnnnnnnnnnnnnnnnnnnnnnnnnnnnnnnnnnnnnnnnnnnnnnnnnnnnnnnnnnnnnnnnnnnnnnnnnnnnnnnnnnnnnnnnnnnnnnnnnnnnnnnnnnnnnnnnnnnnnnnnnnnnnnnnnnnnnnnnnnnnnnnnnnnnnnnnnnnnnnnnnnnnnnnnnnnnnnnnnnnnnnnnnnnnnnnnnnnnnnnnnnnnnnnnnnnnnnnnnnnnnnnnnnnnnnnnnnnnnnnnnnnnnnnnnnnnnnnnnnnnnnnnnnnnnnnnnnnnnnnnnnnnnnnnnnnnnnnnnnnnnnnnnnnnnnnnnnnnnnnnnnnnnnnnnnnnnnnnnnnnnnnnnnnnnnnnnnnnnnnnnnnnnnnnnnnnnnnnnnnnnnnnnnnnnnnnnnnnnnnnnnnnnnnnnnnnnnnnnnnnnnnnnnnnnnnnnnnnnnnnnnnnnnnnnnnnnnnnnnnnnnnnnnnnnnnnnnnnnnnnnnnnnnnnnnnnnnnnnnnnnnnnnnnnnnnnnnnnnnnnnnnnnnnnnnnnnnnnnnnnnnnnnnnnnnnnnnnnnnnnnnnnnnnnnnnnnnnnnnnnnnnnnnnnnnnnnnnnnnnnnnnnnnnnnnnnnnnnnnnnnnnnnnnnnnnnnnnnnnnnnnnnnnnnnnnnnnnnnnnnnnnnnnnnnnnnnnnnnnnnnnnnnnnnnnnnnnnnnnnnnnnnnnnnnnnnnnnnnnnnnnnnnnnnnnnnnnnnnnnnnnnnnnnnnnnnnnnnnnnnnnnnnnnnnnnnnnnnnnnnnnnnnnnnnnnnnnnnnnnnnnnnnnnnnnnnnnnnnnnnnnnnnnnnnnnnnnnnnnnnnnnnnnnnnnnnnnnnnnnnnnnnnnnnnnnnnnnnnnnnnnnnnnnnnnnnnnnnnnnnnnnnnnnnnnnnnnnnnnnnnnnnnnnnnnnnnnnnnnnnnnnnnnnnnnnnnnnnnnnnnnnnnnnnnnnnnnnnnnnnnnnnnnnnnnnnnnnnnnnnnnnnnnnnnnnnnnnnnnnnnnnnnnnnnnnnnnnnnnnnnnnnnnnnnnnnnnnnnnnnnnnnnnnnnnnnnnnnnnnnnnnnnnnnnnnnnnnnnnnnnnnnnnnnnnnnnnnnnnnnnnnnnnnnnnnnnnnnnnnnnnnnnnnnnnnnnnnnnnnnnnnnnnnnnnnnnnnnnnnnnnnnnnnnnnnnnnnnnnnnnnnnnnnnnnnnnnnnnnnnnnnnnnnnnnnnnnnnnnnnnnnnnnnnnnnnnnnnnnnnnnnnnnnnnnnnnnnnnnnnnnnnnnnnnnnnnnnnnnnnnnnnnnnnnnnnnnnnnnnnnnnnnnnnnnnnnnnnnnnnnnnnnnnnnnnnnnnnnnnnnnnnnnnnnnnnnnnnnnnnnnnnnnnnnnnnnnnnnnnnnnnnnnnnnnnnnnnnnnnnnnnnnnnnnnnnnnnnnnnnnnnnnnnnnnnnnnnnnnnnnnnnnnnnnnnnnnnnnnnnnnnnnnnnnnnnnnnnnnnnnnnnnnnnnnnnnnnnnnnnnnnnnnnnnnnnnnnnnnnnnnnnnnnnnnnnnnnnnnnnnnnnnnnnnnnnnnnnnnnnnnnnnnnnnnnnnnnnnnnnnnnnnnnnnnnnnnnnnnnnnnnnnnnnnnnnnnnnnnnnnnnnnnnnnnnnnnnnnnnnnnnnnnnnnnnnnnnnnnnnnnnnnnnnnnnnnnnnnnnnnnnnnnnnnnnnnnnnnnnnnnnnnnnnnnnnnnnnnnnnnnnnnnnnnnnnnnnnnnnnnnnnnnnnnnnnnnnnnnnnnnnnnnnnnnnnnnnnnnnnnnnnnnnnnnnnnnnnnnnnnnnnnnnnnnnnnnnnnnnnnnnnnnnnnnnnnnnnnnnnnnnnnnnnnnnnnnnnnnnnnnnnnnnnnnnnnnnnnnnnnnnnnnnnnnnnnnnnnnnnnnnnnnnnnnnnnnnnnnnnnnnnnnnnnnnnnnnnnnnnnnnnnnnnnnnnnnnnnnnnnnnnnnnnnnnnnnnnnnnnnnnnnnnnnnnnnnnnnnnnnnnnnnnnnnnnnnnnnnnnnnnnnnnnnnnnnnnnnnnnnnnnnnnnnnnnnnnnnnnnnnnnnnnnnnnnnnnnnnnnnnnnnnnnnnnnnnnnnnnnnnnnnnnnnnnnnnnnnnnnnnnnnnnnnnnnnnnnnnnnnnnnnnnnnnnnnnnnnnnnnnnnnnnnnnnnnnnnnnnnnnnnnnnnnnnnnnnnnnnnnnnnnnnnnnnnnnnnnnnnnnnnnnnnnnnnnnnnnnnnnnnnnnnnnnnnnnnnnnnnnnnnnnnnnnnnnnnnnnnnnnnnnnnnnnnnnnnnnnnnnnnnnnnnnnnnnnnnnnnnnnnnnnnnnnnnnnnnnnnnnnnnnnnnnnnnnnnnnnnnnnnnnnnnnnnnnnnnnnnnnnnnnnnnnnnnnnnnnnnnnnnnnnnnnnnnnnnnnnnnnnnnnnnnnnnnnnnnnnnnnnnnnnnnnnnnnnnnnnnnnnnnnnnnnnnnnnnnnnnnnnnnnnnnnnnnnnnnnnnnnnnnnnnnnnnnnnnnnnnnnnnnnnnnnnnnnnnnnnnnnnnnnnnnnnnnnnnnnnnnnnnnnnnnnnnnnnnnnnnnnnnnnnnnnnnnnnnnnnnnnnnnnnnnnnnnnnnnnnnnnnnnnnnnnnnnnnnnnnnnnnnnnnnnnnnnnnnnnnnnnnnnnnnnnnnnnnnnnnnnnnnnnnnnnnnnnnnnnnnnnnnnnnnnnnnnnnnnnnnnnnnnnnnnnnnnnnnnnnnnnnnnnnnnnnnnnnnnnnnnnnnnnnnnnnnnnnnnnnnnnnnnnnnnnnnnnnnnnnnnnnnnnnnnnnnnnnnnnnnnnnnnnnnnnnnnnnnnnnnnnnnnnnnnnnnnnnnnnnnnnnnnnnnnnnnnnnnnnnnnnnnnnnnnnnnnnnnnnnnnnnnnnnnnnnnnnnnnnnnnnnnnnnnnnnnnnnnnnnnnnnnnnnnnnnnnnnnnnnnnnnnnnnnnnnnnnnnnnnnnnnnnnnnnnnnnnnnnnnnnnnnnnnnnnnnnnnnnnnnnnnnnnnnnnnnnnnnnnnnnnnnnnnnnnnnnnnnnnnnnnnnnnnnnnnnnnnnnnnnnnnnnnnnnnnnnnnnnnnnnnnnnnnnnnnnnnnnnnnnnnnnnnnnnnnnnnnnnnnnnnnnnnnnnnnnnnnnnnnnnnnnnnnnnnnnnnnnnnnnnnnnnnnnnnnnnnnnnnnnnnnnnnnnnnnnnnnnnnnnnnnnnnnnnnnnnnnnnnnnnnnnnnnnnnnnnnnnnnnnnnnnnnnnnnnnnnnnnnnnnnnnnnnnnnnnnnnnnnnnnnnnnnnnnnnnnnnnnnnnnnnnnnnnnnnnnnnnnnnnnnnnnnnnnnnnnnnnnnnnnnnnnnnnnnnnnnnnnnnnnnnnnnnnnnnnnnnnnnnnnnnnnnnnnnnnnnnnnnnnnnnnnnnnnnnnnnnnnnnnnnnnnnnnnnnnnnnnnnnnnnnnnnnnnnnnnnnnnnnnnnnnnnnnnnnnnnnnnnnnnnnnnnnnnnnnnnnnnnnnnnnnnnnnnnnnnnnnnnnnnnnnnnnnnnnnnnnnnnnnnnnnnnnnnnnnnnnnnnnnnnnnnnnnnnnnnnnnnnnnnnnnnnnnnnnnnnnnnnnnnnnnnnnnnnnnnnnnnnnnnnnnnnnnnnnnnnnnnnnnnnnnnnnnnnnnnnnnnnnnnnnnnnnnnnnnnnnnnnnnnnnnnnnnnnnnnnnnnnnnnnnnnnnnnnnnnnnnnnnnnnnnnnnnnnnnnnnnnnnnnnnnnnnnnnnnnnnnnnnnnnnnnnnnnnnnnnnnnnnnnnnnnnnnnnnnnnnnnnnnnnnnnnnnnnnnnnnnnnnnnnnnnnnnnnnnnnnnnnnnnnnnnnnnnnnnnnnnnnnnnnnnnnnnnnnnnnnnnnnnnnnnnnnnnnnnnnnnnnnnnnnnnnnnnnnnnnnnnnnnnnnnnnnnnnnnnnnnnnnnnnnnnnnnnnnnnnnnnnnnnnnnnnnnnnnnnnnnnnnnnnnnnnnnnnnnnnnnnnnnnnnnnnnnnnnnnnnnnnnnnnnnnnnnnnnnnnnnnnnnnnnnnnnnnnnnnnnnnnnnnnnnnnnnnnnnnnnnnnnnnnnnnnnnnnnnnnnnnnnnnnnnnnnnnnnnnnnnnnnnnnnnnnnnnnnnnnnnnnnnnnnnnnnnnnnnnnnnnnnnnnnnnnnnnnnnnnnnnnnnnnnnnnnnnnnnnnnnnnnnnnnnnnnnnnnnnnnnnnnnnnnnnnnnnnnnnnnnnnnnnnnnnnnnnnnnnnnnnnnnnnnnnnnnnnnnnnnnnnnnnnnnnnnnnnnnnnnnnnnnnnnnnnnnnnnnnnnnnnnnnnnnnnnnnnnnnnnnnnnnnnnnnnnnnnnnnnnnnnnnnnnnnnnnnnnnnnnnnnnnnnnnnnnnnnnnnnnnnnnnnnnnnnnnnnnnnnnnnnnnnnnnnnnnnnnnnnnnnnnnnnnnnnnnnnnnnnnnnnnnnnnnnnnnnnnnnnnnnnnnnnnnnnnnnnnnnnnnnnnnnnnnnnnnnnnnnnnnnnnnnnnnnnnnnnnnnnnnnnnnnnnnnnnnnnnnnnnnnnnnnnnnnnnnnnnnnnnnnnnnnnnnnnnnnnnnnnnnnnnnnnnnnnnnnnnnnnnnnnnnnnnnnnnnnnnnnnnnnnnnnnnnnnnnnnnnnnnnnnnnnnnnnnnnnnnnnnnnnnnnnnnnnnnnnnnnnnnnnnnnnnnnnnnnnnnnnnnnnnnnnnnnnnnnnnnnnnnnnnnnnnnnnnnnnnnnnnnnnnnnnnnnnnnnnnnnnnnnnnnnnnnnnnnnnnnnnnnnnnnnnnnnnnnnnnnnnnnnnnnnnnnnnnnnnnnnnnnnnnnnnnnnnnnnnnnnnnnnnnnnnnnnnnnnnnnnnnnnnnnnnnnnnnnnnnnnnnnnnnnnnnnnnnnnnnnnnnnnnnnnnnnnnnnnnnnnnnnnnnnnnnnnnnnnnnnnnnnnnnnnnnnnnnnnnnnnnnnnnnnnnnnnnnnnnnnnnnnnnnnnnnnnnnnnnnnnnnnnnnnnnnnnnnnnnnnnnnnnnnnnnnnnnnnnnnnnnnnnnnnnnnnnnnnnnnnnnnnnnnnnnnnnnnnnnnnnnnnnnnnnnnnnnnnnnnnnnnnnnnnnnnnnnnnnnnnnnnnnnnnnnnnnnnnnnnnnnnnnnnnnnnnnnnnnnnnnnnnnnnnnnnnnnnnnnnnnnnnnnnnnnnnnnnnnnnnnnnnnnnnnnnnnnnnnnnnnnnnnnnnnnnnnnnnnnnnnnnnnnnnnnnnnnnnnnnnnnnnnnnnnnnnnnnnnnnnnnnnnnnnnnnnnnnnnnnnnnnnnnnnnnnnnnnnnnnnnnnnnnnnnnnnnnnnnnnnnnnnnnnnnnnnnnnnnnnnnnnnnnnnnnnnnnnnnnnnnnnnnnnnnnnnnnnnnnnnnnnnnnnnnnnnnnnnnnnnnnnnnnnnnnnnnnnnnnnnnnnnnnnnnnnnnnnnnnnnnnnnnnnnnnnnnnnnnnnnnnnnnnnnnnnnnnnnnnnnnnnnnnnnnnnnnnnnnnnnnnnnnnnnnnnnnnnnnnnnnnnnnnnnnnnnnnnnnnnnnnnnnnnnnnnnnnnnnnnnnnnnnnnnnnnnnnnnnnnnnnnnnnnnnnnnnnnnnnnnnnnnnnnnnnnnnnnnnnnnnnnnnnnnnnnnnnnnnnnnnnnnnnnnnnnnnnnnnnnnnnnnnnnnnnnnnnnnnnnnnnnnnnnnnnnnnnnnnnnnnnnnnnnnnnnnnnnnnnnnnnnnnnnnnnnnnnnnnnnnnnnnnnnnnnnnnnnnnnnnnnnnnnnnnnnnnnnnnnnnnnnnnnnnnnnnnnnnnnnnnnnnnnnnnnnnnnnnnnnnnnnnnnnnnnnnnnnnnnnnnnnnnnnnnnnnnnnnnnnnnnnnnnnnnnnnnnnnnnnnnnnnnnnnnnnnnnnnnnnnnnnnnnnnnnnnnnnnnnnnnnnnnnnnnnnnnnnnnnnnnnnnnnnnnnnnnnnnnnnnnnnnnnnnnnnnnnnnnnnnnnnnnnnnnnnnnnnnnnnnnnnnnnnnnnnnnnnnnnnnnnnnnnnnnnnnnnnnnnnnnnnnnnnnnnnnnnnnnnnnnnnnnnnnnnnnnnnnnnnnnnnnnnnnnnnnnnnnnnnnnnnnnnnnnnnnnnnnnnnnnnnnnnnnnnnnnnnnnnnnnnnnnnnnnnnnnnnnnnnnnnnnnnnnnnnnnnnnnnnnnnnnnnnnnnnnnnnnnnnnnnnnnnnnnnnnnnnnnnnnnnnnnnnnnnnnnnnnnnnnnnnnnnnnnnnnnnnnnnnnnnnnnnnnnnnnnnnnnnnnnnnnnnnnnnnnnnnnnnnnnnnnnnnnnnnnnnnnnnnnnnnnnnnnnnnnnnnnnnnnnnnnnnnnnnnnnnnnnnnnnnnnnnnnnnnnnnnnnnnnnnnnnnnnnnnnnnnnnnnnnnnnnnnnnnnnnnnnnnnnnnnnnnnnnnnnnnnnnnnnnnnnnnnnnnnnnnnnnnnnnnnnnnnnnnnnnnnnnnnnnnnnnnnnnnnnnnnnnnnnnnnnnnnnnnnnnnnnnnnnnnnnnnnnnnnnnnnnnnnnnnnnnnnnnnnnnnnnnnnnnnnnnnnnnnnnnnnnnnnnnnnnnnnnnnnnnnnnnnnnnnnnnnnnnnnnnnnnnnnnnnnnnnnnnnnnnnnnnnnnnnnnnnnnnnnnnnnnnnnnnnnnnnnnnnnnnnnnnnnnnnnnnnnnnnnnnnnnnnnnnnnnnnnnnnnnnnnnnnnnnnnnnnnnnnnnnnnnnnnnnnnnnnnnnnnnnnnnnnnnnnnnnnnnnnnnnnnnnnnnnnnnnnnnnnnnnnnnnnnnnnnnnnnnnnnnnnnnnnnnnnnnnnnnnnnnnnnnnnnnnnnnnnnnnnnnnnnnnnnnnnnnnnnnnnnnnnnnnnnnnnnnnnnnnnnnnnnnnnnnnnnnnnnnnnnnnnnnnnnnnnnnnnnnnnnnnnnnnnnnnnnnnnnnnnnnnnnnnnnnnnnnnnnnnnnnnnnnnnnnnnnnnnnnnnnnnnnnnnnnnnnnnnnnnnnnnnnnnnnnnnnnnnnnnnnnnnnnnnnnnnnnnnnnnnnnnnnnnnnnnnnnnnnnnnnnnnnnnnnnnnnnnnnnnnnnnnnnnnnnnnnnnnnnnnnnnnnnnnnnnnnnnnnnnnnnnnnnnnnnnnnnnnnnnnnnnnnnnnnnnnnnnnnnnnnnnnnnnnnnnnnnnnnnnnnnnnnnnnnnnnnnnnnnnnnnnnnnnnnnnnnnnnnnnnnnnnnnnnnnnnnnnnnnnnnnnnnnnnnnnnnnnnnnnnnnnnnnnnnnnnnnnnnnnnnnnnnnnnnnnnnnnnnnnnnnnnnnnnnnnnnnnnnnnnnnnnnnnnnnnnnnnnnnnnnnnnnnnnnnnnnnnnnnnnnnnnnnnnnnnnnnnnnnnnnnnnnnnnnnnnnnnnnnnnnnnnnnnnnnnnnnnnnnnnnnnnnnnnnnnnnnnnnnnnnnnnnnnnnnnnnnnnnnnnnnnnnnnnnnnnnnnnnnnnnnnnnnnnnnnnnnnnnnnnnnnnnnnnnnnnnnnnnnnnnnnnnnnnnnnnnnnnnnnnnnnnnnnnnnnnnnnnnnnnnnnnnnnnnnnnnnnnnnnnnnnnnnnnnnnnnnnnnnnnnnnnnnnnnnnnnnnnnnnnnnnnnnnnnnnnnnnnnnnnnnnnnnnnnnnnnnnnnnnnnnnnnnnnnnnnnnnnnnnnnnnnnnnnnnnnnnnnnnnnnnnnnnnnnnnnnnnnnnnnnnnnnnnnnnnnnnnnnnnnnnnnnnnnnnnnnnnnnnnnnnnnnnnnnnnnnnnnnnnnnnnnnnnnnnnnnnnnnnnnnnnnnnnnnnnnnnnnnnnnnnnnnnnnnnnnnnnnnnnnnnnnnnnnnnnnnnnnnnnnnnnnnnnnnnnnnnnnnnnnnnnnnnnnnnnnnnnnnnnnnnnnnnnnnnnnnnnnnnnnnnnnnnnnnnnnnnnnnnnnnnnnnnnnnnnnnnnnnnnnnnnnnnnnnnnnnnnnnnnnnnnnnnnnnnnnnnnnnnnnnnnnnnnnnnnnnnnnnnnnnnnnnnnnnnnnnnnnnnnnnnnnnnnnnnnnnnnnnnnnnnnnnnnnnnnnnnnnnnnnnnnnnnnnnnnnnnnnnnnnnnnnnnnnnnnnnnnnnnnnnnnnnnnnnnnnnnnnnnnnnnnnnnnnnnnnnnnnnnnnnnnnnnnnnnnnnnnnnnnnnnnnnnnnnnnnnnnnnnnnnnnnnnnnnnnnnnnnnnnnnnnnnnnnnnnnnnnnnnnnnnnnnnnnnnnnnnnnnnnnnnnnnnnnnnnnnnnnnnnnnnnnnnnnnnnnnnnnnnnnnnnnnnnnnnnnnnnnnnnnnnnnnnnnnnnnnnnnnnnnnnnnnnnnnnnnnnnnnnnnnnnnnnnnnnnnnnnnnnnnnnnnnnnnnnnnnnnnnnnnnnnnnnnnnnnnnnnnnnnnnnnnnnnnnnnnnnnnnnnnnnnnnnnnnnnnnnnnnnnnnnnnnnnnnnnnnnnnnnnnnnnnnnnnnnnnnnnnnnnnnnnnnnnnnnnnnnnnnnnnnnnnnnnnnnnnnnnnnnnnnnnnnnnnnnnnnnnnnnnnnnnnnnnnnnnnnnnnnnnnnnnnnnnnnnnnnnnnnnnnnnnnnnnnnnnnnnnnnnnnnnnnnnnnnnnnnnnnnnnnnnnnnnnnnnnnnnnnnnnnnnnnnnnnnnnnnnnnnnnnnnnnnnnnnnnnnnnnnnnnnnnnnnnnnnnnnnnnnnnnnnnnnnnnnnnnnnnnnnnnnnnnnnnnnnnnnnnnnnnnnnnnnnnnnnnnnnnnnnnnnnnnnnnnnnnnnnnnnnnnnnnnnnnnnnnnnnnnnnnnnnnnnnnnnnnnnnnnnnnnnnnnnnnnnnnnnnnnnnnnnnnnnnnnnnnnnnnnnnnnnnnnnnnnnnnnnnnnnnnnnnnnnnnnnnnnnnnnnnnnnnnnnnnnnnnnnnnnnnnnnnnnnnnnnnnnnnnnnnnnnnnnnnnnnnnnnnnnnnnnnnnnnnnnnnnnnnnnnnnnnnnnnnnnnnnnnnnnnnnnnnnnnnnnnnnnnnnnnnnnnnnnnnnnnnnnnnnnnnnnnnnnnnnnnnnnnnnnnnnnnnnnnnnnnnnnnnnnnnnnnnnnnnnnnnnnnnnnnnnnnnnnnnnnnnnnnnnnnnnnnnnnnnnnnnnnnnnnnnnnnnnnnnnnnnnnnnnnnnnnnnnnnnnnnnnnnnnnnnnnnnnnnnnnnnnnnnnnnnnnnnnnnnnnnnnnnnnnnnnnnnnnnnnnnnnnnnnnnnnnnnnnnnnnnnnnnnnnnnnnnnnnnnnnnnnnnnnnnnnnnnnnnnnnnnnnnnnnnnnnnnnnnnnnnnnnnnnnnnnnnnnnnnnnnnnnnnnnnnnnnnnnnnnnnnnnnnnnnnnnnnnnnnnnnnnnnnnnnnnnnnnnnnnnnnnnnnnnnnnnnnnnnnnnnnnnnnnnnnnnnnnnnnnnnnnnnnnnnnnnnnnnnnnnnnnnnnnnnnnnnnnnnnnnnnnnnnnnnnnnnnnnnnnnnnnnnnnnnnnnnnnnnnnnnnnnnnnnnnnnnnnnnnnnnnnnnnnnnnnnnnnnnnnnnnnnnnnnnnnnnnnnnnnnnnnnnnnnnnnnnnnnnnnnnnnnnnnnnnnnnnnnnnnnnnnnnnnnnnnnnnnnnnnnnnnnnnnnnnnnnnnnnnnnnnnnnnnnnnnnnnnnnnnnnnnnnnnnnnnnnnnnnnnnnnnnnnnnnnnnnnnnnnnnnnnnnnnnnnnnnnnnnnnnnnnnnnnnnnnnnnnnnnnnnnnnnnnnnnnnnnnnnnnnnnnnnnnnnnnnnnnnnnnnnnnnnnnnnnnnnnnnnnnnnnnnnnnnnnnnnnnnnnnnnnnnnnnnnnnnnnnnnnnnnnnnnnnnnnnnnnnnnnnnnnnnnnnnnnnnnnnnnnnnnnnnnnnnnnnnnnnnnnnnnnnnnnnnnnnnnnnnnnnnnnnnnnnnnnnnnnnnnnnnnnnnnnnnnnnnnnnnnnnnnnnnnnnnnnnnnnnnnnnnnnnnnnnnnnnnnnnnnnnnnnnnnnnnnnnnnnnnnnnnnnnnnnnnnnnnnnnnnnnnnnnnnnnnnnnnnnnnnnnnnnnnnnnnnnnnnnnnnnnnnnnnnnnnnnnnnnnnnnnnnnnnnnnnnnnnnnnnnnnnnnnnnnnnnnnnnnnnnnnnnnnnnnnnnnnnnnnnnnnnnnnnnnnnnnnnnnnnnnnnnnnnnnnnnnnnnnnnnnnnnnnnnnnnnnnnnnnnnnnnnnnnnnnnnnnnnnnnnnnnnnnnnnnnnnnnnnnnnnnnnnnnnnnnnnnnnnnnnnnnnnnnnnnnnnnnnnnnnnnnnnnnnnnnnnnnnnnnnnnnnnnnnnnnnnnnnnnnnnnnnnnnnnnnnnnnnnnnnnnnnnnnnnnnnnnnnnnnnnnnnnnnnnnnnnnnnnnnnnnnnnnnnnnnnnnnnnnnnnnnnnnnnnnnnnnnnnnnnnnnnnnnnnnnnnnnnnnnnnnnnnnnnnnnnnnnnnnnnnnnnnnnnnnnnnnnnnnnnnnnnnnnnnnnnnnnnnnnnnnnnnnnnnnnnnnnnnnnnnnnnnnnnnnnnnnnnnnnnnnnnnnnnnnnnnnnnnnnnnnnnnnnnnnnnnnnnnnnnnnnnnnnnnnnnnnnnnnnnnnnnnnnnnnnnnnnnnnnnnnnnnnnnnnnnnnnnnnnnnnnnnnnnnnnnnnnnnnnnnnnnnnnnnnnnnnnnnnnnnnnnnnnnnnnnnnnnnnnnnnnnnnnnnnnnnnnnnnnnnnnnnnnnnnnnnnnnnnnnnnnnnnnnnnnnnnnnnnnnnnnnnnnnnnnnnnnnnnnnnnnnnnnnnnnnnnnnnnnnnnnnnnnnnnnnnnnnnnnnnnnnnnnnnnnnnnnnnnnnnnnnnnnnnnnnnnnnnnnnnnnnnnnnnnnnnnnnnnnnnnnnnnnnnnnnnnnnnnnnnnnnnnnnnnnnnnnnnnnnnnnnnnnnnnnnnnnnnnnnnnnnnnnnnnnnnnnnnnnnnnnnnnnnnnnnnnnnnnnnnnnnnnnnnnnnnnnnnnnnnnnnnnnnnnnnnnnnnnnnnnnnnnnnnnnnnnnnnnnnnnnnnnnnnnnnnnnnnnnnnnnnnnnnnnnnnnnnnnnnnnnnnnnnnnnnnnnnnnnnnnnnnnnnnnnnnnnnnnnnnnnnnnnnnnnnnnnnnnnnnnnnnnnnnnnnnnnnnnnnnnnnnnnnnnnnnnnnnnnnnnnnnnnnnnnnnnnnnnnnnnnnnnnnnnnnnnnnnnnnnnnnnnnnnnnnnnnnnnnnnnnnnnnnnnnnnnnnnnnnnnnnnnnnnnnnnnnnnnnnnnnnnnnnnnnnnnnnnnnnnnnnnnnnnnnnnnnnnnnnnnnnnnnnnnnnnnnnnnnnnnnnnnnnnnnnnnnnnnnnnnnnnnnnnnnnnnnnnnnnnnnnnnnnnnnnnnnnnnnnnnnnnnnnnnnnnnnnnnnnnnnnnnnnnnnnnnnnnnnnnnnnnnnnnnnnnnnnnnnnnnnnnnnnnnnnnnnnnnnnnnnnnnnnnnnnnnnnnnnnnnnnnnnnnnnnnnnnnnnnnnnnnnnnnnnnnnnnnnnnnnnnnnnnnnnnnnnnnnnnnnnnnnnnnnnnnnnnnnnnnnnnnnnnnnnnnnnnnnnnnnnnnnnnnnnnnnnnnnnnnnnnnnnnnnnnnnnnnnnnnnnnnnnnnnnnnnnnnnnnnnnnnnnnnnnnnnnnnnnnnnnnnnnnnnnnnnnnnnnnnnnnnnnnnnnnnnnnnnnnnnnnnnnnnnnnnnnnnnnnnnnnnnnnnnnnnnnnnnnnnnnnnnnnnnnnnnnnnnnnnnnnnnnnnnnnnnnnnnnnnnnnnnnnnnnnnnnnnnnnnnnnnnnnnnnnnnnnnnnnnnnnnnnnnnnnnnnnnnnnnnnnnnnnnnnnnnnnnnnnnnnnnnnnnnnnnnnnnnnnnnnnnnnnnnnnnnnnnnnnnnnnnnnnnnnnnnnnnnnnnnnnnnnnnnnnnnnnnnnnnnnnnnnnnnnnnnnnnnnnnnnnnnnnnnnnnnnnnnnnnnnnnnnnnnnnnnnnnnnnnnnnnnnnnnnnnnnnnnnnnnnnnnnnnnnnnnnnnnnnnnnnnnnnnnnnnnnnnnnnnnnnnnnnnnnnnnnnnnnnnnnnnnnnnnnnnnnnnnnnnnnnnnnnnnnnnnnnnnnnnnnnnnnnnnnnnnnnnnnnnnnnnnnnnnnnnnnnnnnnnnnnnnnnnnnnnnnnnnnnnnnnnnnnnnnnnnnnnnnnnnnnnnnnnnnnnnnnnnnnnnnnnnnnnnnnnnnnnnnnnnnnnnnnnnnnnnnnnnnnnnnnnnnnnnnnnnnnnnnnnnnnnnnnnnnnnnnnnnnnnnnnnnnnnnnnnnnnnnnnnnnnnnnnnnnnnnnnnnnnnnnnnnnnnnnnnnnnnnnnnnnnnnnnnnnnnnnnnnnnnnnnnnnnnnnnnnnnnnnnnnnnnnnnnnnnnnnnnnnnnnnnnnnnnnnnnnnnnnnnnnnnnnnnnnnnnnnnnnnnnnnnnnnnnnnnnnnnnnnnnnnnnnnnnnnnnnnnnnnnnnnnnnnnnnnnnnnnnnnnnnnnnnnnnnnnnnnnnnnnnnnnnnnnnnnnnnnnnnnnnnnnnnnnnnnnnnnnnnnnnnnnnnnnnnnnnnnnnnnnnnnnnnnnnnnnnnnnnnnnnnnnnnnnnnnnnnnnnnnnnnnnnnnnnnnnnnnnnnnnnnnnnnnnnnnnnnnnnnnnnnnnnnnnnnnnnnnnnnnnnnnnnnnnnnnnnnnnnnnnnnnnnnnnnnnnnnnnnnnnnnnnnnnnnnnnnnnnnnnnnnnnnnnnnnnnnnnnnnnnnnnnnnnnnnnnnnnnnnnnnnnnnnnnnnnnnnnnnnnnnnnnnnnnnnnnnnnnnnnnnnnnnnnnnnnnnnnnnnnnnnnnnnnnnnnnnnnnnnnnnnnnnnnnnnnnnnnnnnnnnnnnnnnnnnnnnnnnnnnnnnnnnnnnnnnnnnnnnnnnnnnnnnnnnnnnnnnnnnnnnnnnnnnnnnnnnnnnnnnnnnnnnnnnnnnnnnnnnnnnnnnnnnnnnnnnnnnnnnnnnnnnnnnnnnnnnnnnnnnnnnnnnnnnnnnnnnnnnnnnnnnnnnnnnnnnnnnnnnnnnnnnnnnnnnnnnnnnnnnnnnnnnnnnnnnnnnnnnnnnnnnnnnnnnnnnnnnnnnnnnnnnnnnnnnnnnnnnnnnnnnnnnnnnnnnnnnnnnnnnnnnnnnnnnnnnnnnnnnnnnnnnnnnnnnnnnnnnnnnnnnnnnnnnnnnnnnnnnnnnnnnnnnnnnnnnnnnnnnnnnnnnnnnnnnnnnnnnnnnnnnnnnnnnnnnnnnnnnnnnnnnnnnnnnnnnnnnnnnnnnnnnnnnnnnnnnnnnnnnnnnnnnnnnnnnnnnnnnnnnnnnnnnnnnnnnnnnnnnnnnnnnnnnnnnnnnnnnnnnnnnnnnnnnnnnnnnnnnnnnnnnnnnnnnnnnnnnnnnnnnnnnnnnnnnnnnnnnnnnnnnnnnnnnnnnnnnnnnnnnnnnnnnnnnnnnnnnnnnnnnnnnnnnnnnnnnnnnnnnnnnnnnnnnnnnnnnnnnnnnnnnnnnnnnnnnnnnnnnnnnnnnnnnnnnnnnnnnnnnnnnnnnnnnnnnnnnnnnnnnnnnnnnnnnnnnnnnnnnnnnnnnnnnnnnnnnnnnnnnnnnnnnnnnnnnnnnnnnnnnnnnnnnnnnnnnnnnnnnnnnnnnnnnnnnnnnnnnnnnnnnnnnnnnnnnnnnnnnnnnnnnnnnnnnnnnnnnnnnnnnnnnnnnnnnnnnnnnnnnnnnnnnnnnnnnnnnnnnnnnnnnnnnnnnnnnnnnnnnnnnnnnnnnnnnnnnnnnnnnnnnnnnnnnnnnnnnnnnnnnnnnnnnnnnnnnnnnnnnnnnnnnnnnnnnnnnnnnnnnnnnnnnnnnnnnnnnnnnnnnnnnnnnnnnnnnnnnnnnnnnnnnnnnnnnnnnnnnnnnnnnnnnnnnnnnnnnnnnnnnnnnnnnnnnnnnnnnnnnnnnnnnnnnnnnnnnnnnnnnnnnnnnnnnnnnnnnnnnnnnnnnnnnnnnnnnnnnnnnnnnnnnnnnnnnnnnnnnnnnnnnnnnnnnnnnnnnnnnnnnnnnnnnnnnnnnnnnnnnnnnnnnnnnnnnnnnnnnnnnnnnnnnnnnnnnnnnnnnnnnnnnnnnnnnnnnnnnnnnnnnnnnnnnnnnnnnnnnnnnnnnnnnnnnnnnnnnnnnnnnnnnnnnnnnnnnnnnnnnnnnnnnnnnnnnnnnnnnnnnnnnnnnnnnnnnnnnnnnnnnnnnnnnnnnnnnnnnnnnnnnnnnnnnnnnnnnnnnnnnnnnnnnnnnnnnnnnnnnnnnnnnnnnnnnnnnnnnnnnnnnnnnnnnnnnnnnnnnnnnnnnnnnnnnnnnnnnnnnnnnnnnnnnnnnnnnnnnnnnnnnnnnnnnnnnnnnnnnnnnnnnnnnnnnnnnnnnnnnnnnnnnnnnnnnnnnnnnnnnnnnnnnnnnnnnnnnnnnnnnnnnnnnnnnnnnnnnnnnnnnnnnnnnnnnnnnnnnnnnnnnnnnnnnnnnnnnnnnnnnnnnnnnnnnnnnnnnnnnnnnnnnnnnnnnnnnnnnnnnnnnnnnnnnnnnnnnnnnnnnnnnnnnnnnnnnnnnnnnnnnnnnnnnnnnnnnnnnnnnnnnnnnnnnnnnnnnnnnnnnnnnnnnnnnnnnnnnnnnnnnnnnnnnnnnnnnnnnnnnnnnnnnnnnnnnnnnnnnnnnnnnnnnnnnnnnnnnnnnnnnnnnnnnnnnnnnnnnnnnnnnnnnnnnnnnnnnnnnnnnnnnnnnnnnnnnnnnnnnnnnnnnnnnnnnnnnnnnnnnnnnnnnnnnnnnnnnnnnnnnnnnnnnnnnnnnnnnnnnnnnnnnnnnnnnnnnnnnnnnnnnnnnnnnnnnnnnnnnnnnnnnnnnnnnnnnnnnnnnnnnnnnnnnnnnnnnnnnnnnnnnnnnnnnnnnnnnnnnnnnnnnnnnnnnnnnnnnnnnnnnnnnnnnnnnnnnnnnnnnnnnnnnnnnnnnnnnnnnnnnnnnnnnnnnnnnnnnnnnnnnnnnnnnnnnnnnnnnnnnnnnnnnnnnnnnnnnnnnnnnnnnnnnnnnnnnnnnnnnnnnnnnnnnnnnnnnnnnnnnnnnnnnnnnnnnnnnnnnnnnnnnnnnnnnnnnnnnnnnnnnnnnnnnnnnnnnnnnnnnnnnnnnnnnnnnnnnnnnnnnnnnnnnnnnnnnnnnnnnnnnnnnnnnnnnnnnnnnnnnnnnnnnnnnnnnnnnnnnnnnnnnnnnnnnnnnnnnnnnnnnnnnnnnnnnnnnnnnnnnnnnnnnnnnnnnnnnnnnnnnnnnnnnnnnnnnnnnnnnnnnnnnnnnnnnnnnnnnnnnnnnnnnnnnnnnnnnnnnnnnnnnnnnnnnnnnnnnnnnnnnnnnnnnnnnnnnnnnnnnnnnnnnnnnnnnnnnnnnnnnnnnnnnnnnnnnnnnnnnnnnnnnnnnnnnnnnnnnnnnnnnnnnnnnnnnnnnnnnnnnnnnnnnnnnnnnnnnnnnnnnnnnnnnnnnnnnnnnnnnnnnnnnnnnnnnnnnnnnnnnnnnnnnnnnnnnnnnnnnnnnnnnnnnnnnnnnnnnnnnnnnnnnnnnnnnnnnnnnnnnnnnnnnnnnnnnnnnnnnnnnnnnnnnnnnnnnnnnnnnnnnnnnnnnnnnnnnnnnnnnnnnnnnnnnnnnnnnnnnnnnnnnnnnnnnnnnnnnnnnnnnnnnnnnnnnnnnnnnnnnnnnnnnnnnnnnnnnnnnnnnnnnnnnnnnnnnnnnnnnnnnnnnnnnnnnnnnnnnnnnnnnnnnnnnnnnnnnnnnnnnnnnnnnnnnnnnnnnnnnnnnnnnnnnnnnnnnnnnnnnnnnnnnnnnnnnnnnnnnnnnnnnnnnnnnnnnnnnnnnnnnnnnnnnnnnnnnnnnnnnnnnnnnnnnnnnnnnnnnnnnnnnnnnnnnnnnnnnnnnnnnnnnnnnnnnnnnnnnnnnnnnnnnnnnnnnnnnnnnnnnnnnnnnnnnnnnnnnnnnnnnnnnnnnnnnnnnnnnnnnnnnnnnnnnnnnnnnnnnnnnnnnnnnnnnnnnnnnnnnnnnnnnnnnnnnnnnnnnnnnnnnnnnnnnnnnnnnnnnnnnnnnnnnnnnnnnnnnnnnnnnnnnnnnnnnnnnnnnnnnnnnnnnnnnnnnnnnnnnnnnnnnnnnnnnnnnnnnnnnnnnnnnnnnnnnnnnnnnnnnnnnnnnnnnnnnnnnnnnnnnnnnnnnnnnnnnnnnnnnnnnnnnnnnnnnnnnnnnnnnnnnnnnnnnnnnnnnnnnnnnnnnnnnnnnnnnnnnnnnnnnnnnnnnnnnnnnnnnnnnnnnnnnnnnnnnnnnnnnnnnnnnnnnnnnnnnnnnnnnnnnnnnnnnnnnnnnnnnnnnnnnnnnnnnnnnnnnnnnnnnnnnnnnnnnnnnnnnnnnnnnnnnnnnnnnnnnnnnnnnnnnnnnnnnnnnnnnnnnnnnnnnnnnnnnnnnnnnnnnnnnnnnnnnnnnnnnnnnnnnnnnnnnnnnnnnnnnnnnnnnnnnnnnnnnnnnnnnnnnnnnnnnnnnnnnnnnnnnnnnnnnnnnnnnnnnnnnnnnnnnnnnnnnnnnnnnnnnnnnnnnnnnnnnnnnnnnnnnnnnnnnnnnnnnnnnnnnnnnnnnnnnnnnnnnnnnnnnnnnnnnnnnnnnnnnnnnnnnnnnnnnnnnnnnnnnnnnnnnnnnnnnnnnnnnnnnnnnnnnnnnnnnnnnnnnnnnnnnnnnnnnnnnnnnnnnnnnnnnnnnnnnnnnnnnnnnnnnnnnnnnnnnnnnnnnnnnnnnnnnnnnnnnnnnnnnnnnnnnnnnnnnnnnnnnnnnnnnnnnnnnnnnnnnnnnnnnnnnnnnnnnnnnnnnnnnnnnnnnnnnnnnnnnnnnnnnnnnnnnnnnnnnnnnnnnnnnnnnnnnnnnnnnnnnnnnnnnnnnnnnnnnnnnnnnnnnnnnnnnnnnnnnnnnnnnnnnnnnnnnnnnnnnnnnnnnnnnnnnnnnnnnnnnnnnnnnnnnnnnnnnnnnnnnnnnnnnnnnnnnnnnnnnnnnnnnnnnnnnnnnnnnnnnnnnnnnnnnnnnnnnnnnnnnnnnnnnnnnnnnnnnnnnnnnnnnnnnnnnnnnnnnnnnnnnnnnnnnnnnnnnnnnnnnnnnnnnnnnnnnnnnnnnnnnnnnnnnnnnnnnnnnnnnnnnnnnnnnnnnnnnnnnnnnnnnnnnnnnnnnnnnnnnnnnnnnnnnnnnnnnnnnnnnnnnnnnnnnnnnnnnnnnnnnnnnnnnnnnnnnnnnnnnnnnnnnnnnnnnnnnnnnnnnnnnnnnnnnnnnnnnnnnnnnnnnnnnnnnnnnnnnnnnnnnnnnnnnnnnnnnnnnnnnnnnnnnnnnnnnnnnnnnnnnnnnnnnnnnnnnnnnnnnnnnnnnnnnnnnnnnnnnnnnnnnnnnnnnnnnnnnnnnnnnnnnnnnnnnnnnnnnnnnnnnnnnnnnnnnnnnnnnnnnnnnnnnnnnnnnnnnnnnnnnnnnnnnnnnnnnnnnnnnnnnnnnnnnnnnnnnnnnnnnnnnnnnnnnnnnnnnnnnnnnnnnnnnnnnnnnnnnnnnnnnnnnnnnnnnnnnnnnnnnnnnnnnnnnnnnnnnnnnnnnnnnnnnnnnnnnnnnnnnnnnnnnnnnnnnnnnnnnnnnnnnnnnnnnnnnnnnnnnnnnnnnnnnnnnnnnnnnnnnnnnnnnnnnnnnnnnnnnnnnnnnnnnnnnnnnnnnnnnnnnnnnnnnnnnnnnnnnnnnnnnnnnnnnnnnnnnnnnnnnnnnnnnnnnnnnnnnnnnnnnnnnnnnnnnnnnnnnnnnnnnnnnnnnnnnnnnnnnnnnnnnnnnnnnnnnnnnnnnnnnnnnnnnnnnnnnnnnnnnnnnnnnnnnnnnnnnnnnnnnnnnnnnnnnnnnnnnnnnnnnnnnnnnnnnnnnnnnnnnnnnnnnnnnnnnnnnnnnnnnnnnnnnnnnnnnnnnnnnnnnnnnnnnnnnnnnnnnnnnnnnnnnnnnnnnnnnnnnnnnnnnnnnnnnnnnnnnnnnnnnnnnnnnnnnnnnnnnnnnnnnnnnnnnnnnnnnnnnnnnnnnnnnnnnnnnnnnnnnnnnnnnnnnnnnnnnnnnnnnnnnnnnnnnnnnnnnnnnnnnnnnnnnnnnnnnnnnnnnnnnnnnnnnnnnnnnnnnnnnnnnnnnnnnnnnnnnnnnnnnnnnnnnnnnnnnnnnnnnnnnnnnnnnnnnnnnnnnnnnnnnnnnnnnnnnnnnnnnnnnnnnnnnnnnnnnnnnnnnnnnnnnnnnnnnnnnnnnnnnnnnnnnnnnnnnnnnnnnnnnnnnnnnnnnnnnnnnnnnnnnnnnnnnnnnnnnnnnnnnnnnnnnnnnnnnnnnnnnnnnnnnnnnnnnnnnnnnnnnnnnnnnnnnnnnnnnnnnnnnnnnnnnnnnnnnnnnnnnnnnnnnnnnnnnnnnnnnnnnnnnnnnnnnnnnnnnnnnnnnnnnnnnnnnnnnnnnnnnnnnnnnnnnnnnnnnnnnnnnnnnnnnnnnnnnnnnnnnnnnnnnnnnnnnnnnnnnnnnnnnnnnnnnnnnnnnnnnnnnnnnnnnnnnnnnnnnnnnnnnnnnnnnnnnnnnnnnnnnnnnnnnnnnnnnnnnnnnnnnnnnnnnnnnnnnnnnnnnnnnnnnnnnnnnnnnnnnnnnnnnnnnnnnnnnnnnnnnnnnnnnnnnnnnnnnnnnnnnnnnnnnnnnnnnnnnnnnnnnnnnnnnnnnnnnnnnnnnnnnnnnnnnnnnnnnnnnnnnnnnnnnnnnnnnnnnnnnnnnnnnnnnnnnnnnnnnnnnnnnnnnnnnnnnnnnnnnnnnnnnnnnnnnnnnnnnnnnnnnnnnnnnnnnnnnnnnnnnnnnnnnnnnnnnnnnnnnnnnnnnnnnnnnnnnnnnnnnnnnnnnnnnnnnnnnnnnnnnnnnnnnnnnnnnnnnnnnnnnnnnnnnnnnnnnnnnnnnnnnnnnnnnnnnnnnnnnnnnnnnnnnnnnnnnnnnnnnnnnnnnnnnnnnnnnnnnnnnnnnnnnnnnnnnnnnnnnnnnnnnnnnnnnnnnnnnnnnnnnnnnnnnnnnnnnnnnnnnnnnnnnnnnnnnnnnnnnnnnnnnnnnnnnnnnnnnnnnnnnnnnnnnnnnnnnnnnnnnnnnnnnnnnnnnnnnnnnnnnnnnnnnnnnnnnnnnnnnnnnnnnnnnnnnnnnnnnnnnnnnnnnnnnnnnnnnnnnnnnnnnnnnnnnnnnnnnnnnnnnnnnnnnnnnnnnnnnnnnnnnnnnnnnnnnnnnnnnnnnnnnnnnnnnnnnnnnnnnnnnnnnnnnnnnnnnnnnnnnnnnnnnnnnnnnnnnnnnnnnnnnnnnnnnnnnnnnnnnnnnnnnnnnnnnnnnnnnnnnnnnnnnnnnnnnnnnnnnnnnnnnnnnnnnnnnnnnnnnnnnnnnnnnnnnnnnnnnnnnnnnnnnnnnnnnnnnnnnnnnnnnnnnnnnnnnnnnnnnnnnnnnnnnnnnnnnnnnnnnnnnnnnnnnnnnnnnnnnnnnnnnnnnnnnnnnnnnnnnnnnnnnnnnnnnnnnnnnnnnnnnnnnnnnnnnnnnnnnnnnnnnnnnnnnnnnnnnnnnnnnnnnnnnnnnnnnnnnnnnnnnnnnnnnnnnnnnnnnnnnnnnnnnnnnnnnnnnnnnnnnnnnnnnnnnnnnnnnnnnnnnnnnnnnnnnnnnnnnnnnnnnnnnnnnnnnnnnnnnnnnnnnnnnnnnnnnnnnnnnnnnnnnnnnnnnnnnnnnnnnnnnnnnnnnnnnnnnnnnnnnnnnnnnnnnnnnnnnnnnnnnnnnnnnnnnnnnnnnnnnnnnnnnnnnnnnnnnnnnnnnnnnnnnnnnnnnnnnnnnnnnnnnnnnnnnnnnnnnnnnnnnnnnnnnnnnnnnnnnnnnnnnnnnnnnnnnnnnnnnnnnnnnnnnnnnnnnnnnnnnnnnnnnnnnnnnnnnnnnnnnnnnnnnnnnnnnnnnnnnnnnnnnnnnnnnnnnnnnnnnnnnnnnnnnnnnnnnnnnnnnnnnnnnnnnnnnnnnnnnnnnnnnnnnnnnnnnnnnnnnnnnnnnnnnnnnnnnnnnnnnnnnnnnnnnnnnnnnnnnnnnnnnnnnnnnnnnnnnnnnnnnnnnnnnnnnnnnnnnnnnnnnnnnnnnnnnnnnnnnnnnnnnnnnnnnnnnnnnnnnnnnnnnnnnnnnnnnnnnnnnnnnnnnnnnnnnnnnnnnnnnnnnnnnnnnnnnnnnnnnnnnnnnnnnnnnnnnnnnnnnnnnnnnnnnnnnnnnnnnnnnnnnnnnnnnnnnnnnnnnnnnnnnnnnnnnnnnnnnnnnnnnnnnnnnnnnnnnnnnnnnnnnnnnnnnnnnnnnnnnnnnnnnnnnnnnnnnnnnnnnnnnnnnnnnnnnnnnnnnnnnnnnnnnnnnnnnnnnnnnnnnnnnnnnnnnnnnnnnnnnnnnnnnnnnnnnnnnnnnnnnnnnnnnnnnnnnnnnnnnnnnnnnnnnnnnnnnnnnnnnnnnnnnnnnnnnnnnnnnnnnnnnnnnnnnnnnnnnnnnnnnnnnnnnnnnnnnnnnnnnnnnnnnnnnnnnnnnnnnnnnnnnnnnnnnnnnnnnnnnnnnnnnnnnnnnnnnnnnnnnnnnnnnnnnnnnnnnnnnnnnnnnnnnnnnnnnnnnnnnnnnnnnnnnnnnnnnnnnnnnnnnnnnnnnnnnnnnnnnnnnnnnnnnnnnnnnnnnnnnnnnnnnnnnnnnnnnnnnnnnnnnnnnnnnnnnnnnnnnnnnnnnnnnnnnnnnnnnnnnnnnnnnnnnnnnnnnnnnnnnnnnnnnnnnnnnnnnnnnnnnnnnnnnnnnnnnnnnnnnnnnnnnnnnnnnnnnnnnnnnnnnnnnnnnnnnnnnnnnnnnnnnnnnnnnnnnnnnnnnnnnnnnnnnnnnnnnnnnnnnnnnnnnnnnnnnnnnnnnnnnnnnnnnnnnnnnnnnnnnnnnnnnnnnnnnnnnnnnnnnnnnnnnnnnnnnnnnnnnnnnnnnnnnnnnnnnnnnnnnnnnnnnnnnnnnnnnnnnnnnnnnnnnnnnnnnnnnnnnnnnnnnnnnnnnnnnnnnnnnnnnnnnnnnnnnnnnnnnnnnnnnnnnnnnnnnnnnnnnnnnnnnnnnnnnnnnnnnnnnnnnnnnnnnnnnnnnnnnnnnnnnnnnnnnnnnnnnnnnnnnnnnnnnnnnnnnnnnnnnnnnnnnnnnnnnnnnnnnnnnnnnnnnnnnnnnnnnnnnnnnnnnnnnnnnnnnnnnnnnnnnnnnnnnnnnnnnnnnnnnnnnnnnnnnnnnnnnnnnnnnnnnnnnnnnnnnnnnnnnnnnnnnnnnnnnnnnnnnnnnnnnnnnnnnnnnnnnnnnnnnnnnnnnnnnnnnnnnnnnnnnnnnnnnnnnnnnnnnnnnnnnnnnnnnnnnnnnnnnnnnnnnnnnnnnnnnnnnnnnnnnnnnnnnnnnnnnnnnnnnnnnnnnnnnnnnnnnnnnnnnnnnnnnnnnnnnnnnnnnnnnnnnnnnnnnnnnnnnnnnnnnnnnnnnnnnnnnnnnnnnnnnnnnnnnnnnnnnnnnnnnnnnnnnnnnnnnnnnnnnnnnnnnnnnnnnnnnnnnnnnnnnnnnnnnnnnnnnnnnnnnnnnnnnnnnnnnnnnnnnnnnnnnnnnnnnnnnnnnnnnnnnnnnnnnnnnnnnnnnnnnnnnnnnnnnnnnnnnnnnnnnnnnnnnnnnnnnnnnnnnnnnnnnnnnnnnnnnnnnnnnnnnnnnnnnnnnnnnnnnnnnnnnnnnnnnnnnnnnnnnnnnnnnnnnnnnnnnnnnnnnnnnnnnnnnnnnnnnnnnnnnnnnnnnnnnnnnnnnnnnnnnnnnnnnnnnnnnnnnnnnnnnnnnnnnnnnnnnnnnnnnnnnnnnnnnnnnnnnnnnnnnnnnnnnnnnnnnnnnnnnnnnnnnnnnnnnnnnnnnnnnnnnnnnnnnnnnnnnnnnnnnnnnnnnnnnnnnnnnnnnnnnnnnnnnnnnnnnnnnnnnnnnnnnnnnnnnnnnnnnnnnnnnnnnnnnnnnnnnnnnnnnnnnnnnnnnnnnnnnnnnnnnnnnnnnnnnnnnnnnnnnnnnnnnnnnnnnnnnnnnnnnnnnnnnnnnnnnnnnnnnnnnnnnnnnnnnnnnnnnnnnnnnnnnnnnnnnnnnnnnnnnnnnnnnnnnnnnnnnnnnnnnnnnnnnnnnnnnnnnnnnnnnnnnnnnnnnnnnnnnnnnnnnnnnnnnnnnnnnnnnnnnnnnnnnnnnnnnnnnnnnnnnnnnnnnnnnnnnnnnnnnnnnnnnnnnnnnnnnnnnnnnnnnnnnnnnnnnnnnnnnnnnnnnnnnnnnnnnnnnnnnnnnnnnnnnnnnnnnnnnnnnnnnnnnnnnnnnnnnnnnnnnnnnnnnnnnnnnnnnnnnnnnnnnnnnnnnnnnnnnnnnnnnnnnnnnnnnnnnnnnnnnnnnnnnnnnnnnnnnnnnnnnnnnnnnnnnnnnnnnnnnnnnnnnnnnnnnnnnnnnnnnnnnnnnnnnnnnnnnnnnnnnnnnnnnnnnnnnnnnnnnnnnnnnnnnnnnnnnnnnnnnnnnnnnnnnnnnnnnnnnnnnnnnnnnnnnnnnnnnnnnnnnnnnnnnnnnnnnnnnnnnnnnnnnnnnnnnnnnnnnnnnnnnnnnnnnnnnnnnnnnnnnnnnnnnnnnnnnnnnnnnnnnnnnnnnnnnnnnnnnnnnnnnnnnnnnnnnnnnnnnnnnnnnnnnnnnnnnnnnnnnnnnnnnnnnnnnnnnnnnnnnnnnnnnnnnnnnnnnnnnnnnnnnnnnnnnnnnnnnnnnnnnnnnnnnnnnnnnnnnnnnnnnnnnnnnnnnnnnnnnnnnnnnnnnnnnnnnnnnnnnnnnnnnnnnnnnnnnnnnnnnnnnnnnnnnnnnnnnnnnnnnnnnnnnnnnnnnnnnnnnnnnnnnnnnnnnnnnnnnnnnnnnnnnnnnnnnnnnnnnnnnnnnnnnnnnnnnnnnnnnnnnnnnnnnnnnnnnnnnnnnnnnnnnnnnnnnnnnnnnnnnnnnnnnnnnnnnnnnnnnnnnnnnnnnnnnnnnnnnnnnnnnnnnnnnnnnnnnnnnnnnnnnnnnnnnnnnnnnnnnnnnnnnnnnnnnnnnnnnnnnnnnnnnnnnnnnnnnnnnnnnnnnnnnnnnnnnnnnnnnnnnnnnnnnnnnnnnnnnnnnnnnnnnnnnnnnnnnnnnnnnnnnnnnnnnnnnnnnnnnnnnnnnnnnnnnnnnnnnnnnnnnnnnnnnnnnnnnnnnnnnnnnnnnnnnnnnnnnnnnnnnnnnnnnnnnnnnnnnnnnnnnnnnnnnnnnnnnnnnnnnnnnnnnnnnnnnnnnnnnnnnnnnnnnnnnnnnnnnnnnnnnnnnnnnnnnnnnnnnnnnnnnnnnnnnnnnnnnnnnnnnnnnnnnnnnnnnnnnnnnnnnnnnnnnnnnnnnnnnnnnnnnnnnnnnnnnnnnnnnnnnnnnnnnnnnnnnnnnnnnnnnnnnnnnnnnnnnnnnnnnnnnnnnnnnnnnnnnnnnnnnnnnnnnnnnnnnnnnnnnnnnnnnnnnnnnnnnnnnnnnnnnnnnnnnnnnnnnnnnnnnnnnnnnnnnnnnnnnnnnnnnnnnnnnnnnnnnnnnnnnnnnnnnnnnnnnnnnnnnnnnnnnnnnnnnnnnnnnnnnnnnnnnnnnnnnnnnnnnnnnnnnnnnnnnnnnnnnnnnnnnnnnnnnnnnnnnnnnnnnnnnnnnnnnnnnnnnnnnnnnnnnnnnnnnnnnnnnnnnnnnnnnnnnnnnnnnnnnnnnnnnnnnnnnnnnnnnnnnnnnnnnnnnnnnnnnnnnnnnnnnnnnnnnnnnnnnnnnnnnnnnnnnnnnnnnnnnnnnnnnnnnnnnnnnnnnnnnnnnnnnnnnnnnnnnnnnnnnnnnnnnnnnnnnnnnnnnnnnnnnnnnnnnnnnnnnnnnnnnnnnnnnnnnnnnnnnnnnnnnnnnnnnnnnnnnnnnnnnnnnnnnnnnnnnnnnnnnnnnnnnnnnnnnnnnnnnnnnnnnnnnnnnnnnnnnnnnnnnnnnnnnnnnnnnnnnnnnnnnnnnnnnnnnnnnnnnnnnnnnnnnnnnnnnnnnnnnnnnnnnnnnnnnnnnnnnnnnnnnnnnnnnnnnnnnnnnnnnnnnnnnnnnnnnnnnnnnnnnnnnnnnnnnnnnnnnnnnnnnnnnnnnnnnnnnnnnnnnnnnnnnnnnnnnnnnnnnnnnnnnnnnnnnnnnnnnnnnnnnnnnnnnnnnnnnnnnnnnnnnnnnnnnnnnnnnnnnnnnnnnnnnnnnnnnnnnnnnnnnnnnnnnnnnnnnnnnnnnnnnnnnnnnnnnnnnnnnnnnnnnnnnnnnnnnnnnnnnnnnnnnnnnnnnnnnnnnnnnnnnnnnnnnnnnnnnnnnnnnnnnnnnnnnnnnnnnnnnnnnnnnnnnnnnnnnnnnnnnnnnnnnnnnnnnnnnnnnnnnnnnnnnnnnnnnnnnnnnnnnnnnnnnnnnnnnnnnnnnnnnnnnnnnnnnnnnnnnnnnnnnnnnnnnnnnnnnnnnnnnnnnnnnnnnnnnnnnnnnnnnnnnnnnnnnnnnnnnnnnnnnnnnnnnnnnnnnnnnnnnnnnnnnnnnnnnnnnnnnnnnnnnnnnnnnnnnnnnnnnnnnnnnnnnnnnnnnnnnnnnnnnnnnnnnnnnnnnnnnnnnnnnnnnnnnnnnnnnnnnnnnnnnnnnnnnnnnnnnnnnnnnnnnnnnnnnnnnnnnnnnnnnnnnnnnnnnnnnnnnnnnnnnnnnnnnnnnnnnnnnnnnnnnnnnnnnnnnnnnnnnnnnnnnnnnnnnnnnnnnnnnnnnnnnnnnnnnnnnnnnnnnnnnnnnnnnnnnnnnnnnnnnnnnnnnnnnnnnnnnnnnnnnnnnnnnnnnnnnnnnnnnnnnnnnnnnnnnnnnnnnnnnnnnnnnnnnnnnnnnnnnnnnnnnnnnnnnnnnnnnnnnnnnnnnnnnnnnnnnnnnnnnnnnnnnnnnnnnnnnnnnnnnnnnnnnnnnnnnnnnnnnnnnnnnnnnnnnnnnnnnnnnnnnnnnnnnnnnnnnnnnnnnnnnnnnnnnnnnnnnnnnnnnnnnnnnnnnnnnnnnnnnnnnnnnnnnnnnnnnnnnnnnnnnnnnnnnnnnnnnnnnnnnnnnnnnnnnnnnnnnnnnnnnnnnnnnnnnnnnnnnnnnnnnnnnnnnnnnnnnnnnnnnnnnnnnnnnnnnnnnnnnnnnnnnnnnnnnnnnnnnnnnnnnnnnnnnnnnnnnnnnnnnnnnnnnnnnnnnnnnnnnnnnnnnnnnnnnnnnnnnnnnnnnnnnnnnnnnnnnnnnnnnnnnnnnnnnnnnnnnnnnnnnnnnnnnnnnnnnnnnnnnnnnnnnnnnnnnnnnnnnnnnnnnnnnnnnnnnnnnnnnnnnnnnnnnnnnnnnnnnnnnnnnnnnnnnnnnnnnnnnnnnnnnnnnnnnnnnnnnnnnnnnnnnnnnnnnnnnnnnnnnnnnnnnnnnnnnnnnnnnnnnnnnnnnnnnnnnnnnnnnnnnnnnnnnnnnnnnnnnnnnnnnnnnnnnnnnnnnnnnnnnnnnnnnnnnnnnnnnnnnnnnnnnnnnnnnnnnnnnnnnnnnnnnnnnnnnnnnnnnnnnnnnnnnnnnnnnnnnnnnnnnnnnnnnnnnnnnnnnnnnnnnnnnnnnnnnnnnnnnnnnnnnnnnnnnnnnnnnnnnnnnnnnnnnnnnnnnnnnnnnnnnnnnnnnnnnnnnnnnnnnnnnnnnnnnnnnnnnnnnnnnnnnnnnnnnnnnnnnnnnnnnnnnnnnnnnnnnnnnnnnnnnnnnnnnnnnnnnnnnnnnnnnnnnnnnnnnnnnnnnnnnnnnnnnnnnnnnnnnnnnnnnnnnnnnnnnnnnnnnnnnnnnnnnnnnnnnnnnnnnnnnnnnnnnnnnnnnnnnnnnnnnnnnnnnnnnnnnnnnnnnnnnnnnnnnnnnnnnnnnnnnnnnnnnnnnnnnnnnnnnnnnnnnnnnnnnnnnnnnnnnnnnnnnnnnnnnnnnnnnnnnnnnnnnnnnnnnnnnnnnnnnnnnnnnnnnnnnnnnnnnnnnnnnnnnnnnnnnnnnnnnnnnnnnnnnnnnnnnnnnnnnnnnnnnnnnnnnnnnnnnnnnnnnnnnnnnnnnnnnnnnnnnnnnnnnnnnnnnnnnnnnnnnnnnnnnnnnnnnnnnnnnnnnnnnnnnnnnnnnnnnnnnnnnnnnnnnnnnnnnnnnnnnnnnnnnnnnnnnnnnnnnnnnnnnnnnnnnnnnnnnnnnnnnnnnnnnnnnnnnnnnnnnnnnnnnnnnnnnnnnnnnnnnnnnnnnnnnnnnnnnnnnnnnnnnnnnnnnnnnnnnnnnnnnnnnnnnnnnnnnnnnnnnnnnnnnnnnnnnnnnnnnnnnnnnnnnnnnnnnnnnnnnnnnnnnnnnnnnnnnnnnnnnnnnnnnnnnnnnnnnnnnnnnnnnnnnnnnnnnnnnnnnnnnnnnnnnnnnnnnnnnnnnnnnnnnnnnnnnnnnnnnnnnnnnnnnnnnnnnnnnnnnnnnnnnnnnnnnnnnnnnnnnnnnnnnnnnnnnnnnnnnnnnnnnnnnnnnnnnnnnnnnnnnnnnnnnnnnnnnnnnnnnnnnnnnnnnnnnnnnnnnnnnnnnnnnnnnnnnnnnnnnnnnnnnnnnnnnnnnnnnnnnnnnnnnnnnnnnnnnnnnnnnnnnnnnnnnnnnnnnnnnnnnnnnnnnnnnnnnnnnnnnnnnnnnnnnnnnnnnnnnnnnnnnnnnnnnnnnnnnnnnnnnnnnnnnnnnnnnnnnnnnnnnnnnnnnnnnnnnnnnnnnnnnnnnnnnnnnnnnnnnnnnnnnnnnnnnnnnnnnnnnnnnnnnnnnnnnnnnnnnnnnnnnnnnnnnnnnnnnnnnnnnnnnnnnnnnnnnnnnnnnnnnnnnnnnnnnnnnnnnnnnnnnnnnnnnnnnnnnnnnnnnnnnnnnnnnnnnnnnnnnnnnnnnnnnnnnnnnnnnnnnnnnnnnnnnnnnnnnnnnnnnnnnnnnnnnnnnnnnnnnnnnnnnnnnnnnnnnnnnnnnnnnnnnnnnnnnnnnnnnnnnnnnnnnnnnnnnnnnnnnnnnnnnnnnnnnnnnnnnnnnnnnnnnnnnnnnnnnnnnnnnnnnnnnnnnnnnnnnnnnnnnnnnnnnnnnnnnnnnnnnnnnnnnnnnnnnnnnnnnnnnnnnnnnnnnnnnnnnnnnnnnnnnnnnnnnnnnnnnnnnnnnnnnnnnnnnnnnnnnnnnnnnnnnnnnnnnnnnnnnnnnnnnnnnnnnnnnnnnnnnnnnnnnnnnnnnnnnnnnnnnnnnnnnnnnnnnnnnnnnnnnnnnnnnnnnnnnnnnnnnnnnnnnnnnnnnnnnnnnnnnnnnnnnnnnnnnnnnnnnnnnnnnnnnnnnnnnnnnnnnnnnnnnnnnnnnnnnnnnnnnnnnnnnnnnnnnnnnnnnnnnnnnnnnnnnnnnnnnnnnnnnnnnnnnnnnnnnnnnnnnnnnnnnnnnnnnnnnnnnnnnnnnnnnnnnnnnnnnnnnnnnnnnnnnnnnnnnnnnnnnnnnnnnnnnnnnnnnnnnnnnnnnnnnnnnnnnnnnnnnnnnnnnnnnnnnnnnnnnnnnnnnnnnnnnnnnnnnnnnnnnnnnnnnnnnnnnnnnnnnnnnnnnnnnnnnnnnnnnnnnnnnnnnnnnnnnnnnnnnnnnnnnnnnnnnnnnnnnnnnnnnnnnnnnnnnnnnnnnnnnnnnnnnnnnnnnnnnnnnnnnnnnnnnnnnnnnnnnnnnnnnnnnnnnnnnnnnnnnnnnnnnnnnnnnnnnnnnnnnnnnnnnnnnnnnnnnnnnnnnnnnnnnnnnnnnnnnnnnnnnnnnnnnnnnnnnnnnnnnnnnnnnnnnnnnnnnnnnnnnnnnnnnnnnnnnnnnnnnnnnnnnnnnnnnnnnnnnnnnnnnnnnnnnnnnnnnnnnnnnnnnnnnnnnnnnnnnnnnnnnnnnnnnnnnnnnnnnnnnnnnnnnnnnnnnnnnnnnnnnnnnnnnnnnnnnnnnnnnnnnnnnnnnnnnnnnnnnnnnnnnnnnnnnnnnnnnnnnnnnnnnnnnnnnnnnnnnnnnnnnnnnnnnnnnnnnnnnnnnnnnnnnnnnnnnnnnnnnnnnnnnnnnnnnnnnnnnnnnnnnnnnnnnnnnnnnnnnnnnnnnnnnnnnnnnnnnnnnnnnnnnnnnnnnnnnnnnnnnnnnnnnnnnnnnnnnnnnnnnnnnnnnnnnnnnnnnnnnnnnnnnnnnnnnnnnnnnnnnnnnnnnnnnnnnnnnnnnnnnnnnnnnnnnnnnnnnnnnnnnnnnnnnnnnnnnnnnnnnnnnnnnnnnnnnnnnnnnnnnnnnnnnnnnnnnnnnnnnnnnnnnnnnnnnnnnnnnnnnnnnnnnnnnnnnnnnnnnnnnnnnnnnnnnnnnnnnnnnnnnnnnnnnnnnnnnnnnnnnnnnnnnnnnnnnnnnnnnnnnnnnnnnnnnnnnnnnnnnnnnnnnnnnnnnnnnnnnnnnnnnnnnnnnnnnnnnnnnnnnnnnnnnnnnnnnnnnnnnnnnnnnnnnnnnnnnnnnnnnnnnnnnnnnnnnnnnnnnnnnnnnnnnnnnnnnnnnnnnnnnnnnnnnnnnnnnnnnnnnnnnnnnnnnnnnnnnnnnnnnnnnnnnnnnnnnnnnnnnnnnnnnnnnnnnnnnnnnnnnnnnnnnnnnnnnnnnnnnnnnnnnnnnnnnnnnnnnnnnnnnnnnnnnnnnnnnnnnnnnnnnnnnnnnnnnnnnnnnnnnnnnnnnnnnnnnnnnnnnnnnnnnnnnnnnnnnnnnnnnnnnnnnnnnnnnnnnnnnnnnnnnnnnnnnnnnnnnnnnnnnnnnnnnnnnnnnnnnnnnnnnnnnnnnnnnnnnnnnnnnnnnnnnnnnnnnnnnnnnnnnnnnnnnnnnnnnnnnnnnnnnnnnnnnnnnnnnnnnnnnnnnnnnnnnnnnnnnnnnnnnnnnnnnnnnnnnnnnnnnnnnnnnnnnnnnnnnnnnnnnnnnnnnnnnnnnnnnnnnnnnnnnnnnnnnnnnnnnnnnnnnnnnnnnnnnnnnnnnnnnnnnnnnnnnnnnnnnnnnnnnnnnnnnnnnnnnnnnnnnnnnnnnnnnnnnnnnnnnnnnnnnnnnnnnnnnnnnnnnnnnnnnnnnnnnnnnnnnnnnnnnnnnnnnnnnnnnnnnnnnnnnnnnnnnnnnnnnnnnnnnnnnnnnnnnnnnnnnnnnnnnnnnnnnnnnnnnnnnnnnnnnnnnnnnnnnnnnnnnnnnnnnnnnnnnnnnnnnnnnnnnnnnnnnnnnnnnnnnnnnnnnnnnnnnnnnnnnnnnnnnnnnnnnnnnnnnnnnnnnnnnnnnnnnnnnnnnnnnnnnnnnnnnnnnnnnnnnnnnnnnnnnnnnnnnnnnnnnnnnnnnnnnnnnnnnnnnnnnnnnnnnnnnnnnnnnnnnnnnnnnnnnnnnnnnnnnnnnnnnnnnnnnnnnnnnnnnnnnnnnnnnnnnnnnnnnnnnnnnnnnnnnnnnnnnnnnnnnnnnnnnnnnnnnnnnnnnnnnnnnnnnnnnnnnnnnnnnnnnnnnnnnnnnnnnnnnnnnnnnnnnnnnnnnnnnnnnnnnnnnnnnnnnnnnnnnnnnnnnnnnnnnnnnnnnnnnnnnnnnnnnnnnnnnnnnnnnnnnnnnnnnnnnnnnnnnnnnnnnnnnnnnnnnnnnnnnnnnnnnnnnnnnnnnnnnnnnnnnnnnnnnnnnnnnnnnnnnnnnnnnnnnnnnnnnnnnnnnnnnnnnnnnnnnnnnnnnnnnnnnnnnnnnnnnnnnnnnnnnnnnnnnnnnnnnnnnnnnnnnnnnnnnnnnnnnnnnnnnnnnnnnnnnnnnnnnnnnnnnnnnnnnnnnnnnnnnnnnnnnnnnnnnnnnnnnnnnnnnnnnnnnnnnnnnnnnnnnnnnnnnnnnnnnnnnnnnnnnnnnnnnnnnnnnnnnnnnnnnnnnnnnnnnnnnnnnnnnnnnnnnnnnnnnnnnnnnnnnnnnnnnnnnnnnnnnnnnnnnnnnnnnnnnnnnnnnnnnnnnnnnnnnnnnnnnnnnnnnnnnnnnnnnnnnnnnnnnnnnnnnnnnnnnnnnnnnnnnnnnnnnnnnnnnnnnnnnnnnnnnnnnnnnnnnnnnnnnnnnnnnnnnnnnnnnnnnnnnnnnnnnnnnnnnnnnnnnnnnnnnnnnnnnnnnnnnnnnnnnnnnnnnnnnnnnnnnnnnnnnnnnnnnnnnnnnnnnnnnnnnnnnnnnnnnnnnnnnnnnnnnnnnnnnnnnnnnnnnnnnnnnnnnnnnnnnnnnnnnnnnnnnnnnnnnnnnnnnnnnnnnnnnnnnnnnnnnnnnnnnnnnnnnnnnnnnnnnnnnnnnnnnnnnnnnnnnnnnnnnnnnnnnnnnnnnnnnnnnnnnnnnnnnnnnnnnnnnnnnnnnnnnnnnnnnnnnnnnnnnnnnnnnnnnnnnnnnnnnnnnnnnnnnnnnnnnnnnnnnnnnnnnnnnnnnnnnnnnnnnnnnnnnnnnnnnnnnnnnnnnnnnnnnnnnnnnnnnnnnnnnnnnnnnnnnnnnnnnnnnnnnnnnnnnnnnnnnnnnnnnnnnnnnnnnnnnnnnnnnnnnnnnnnnnnnnnnnnnnnnnnnnnnnnnnnnnnnnnnnnnnnnnnnnnnnnnnnnnnnnnnnnnnnnnnnnnnnnnnnnnnnnnnnnnnnnnnnnnnnnnnnnnnnnnnnnnnnnnnnnnnnnnnnnnnnnnnnnnnnnnnnnnnnnnnnnnnnnnnnnnnnnnnnnnnnnnnnnnnnnnnnnnnnnnnnnnnnnnnnnnnnnnnnnnnnnnnnnnnnnnnnnnnnnnnnnnnnnnnnnnnnnnnnnnnnnnnnnnnnnnnnnnnnnnnnnnnnnnnnnnnnnnnnnnnnnnnnnnnnnnnnnnnnnnnnnnnnnnnnnnnnnnnnnnnnnnnnnnnnnnnnnnnnnnnnnnnnnnnnnnnnnnnnnnnnnnnnnnnnnnnnnnnnnnnnnnnnnnnnnnnnnnnnnnnnnnnnnnnnnnnnnnnnnnnnnnnnnnnnnnnnnnnnnnnnnnnnnnnnnnnnnnnnnnnnnnnnnnnnnnnnnnnnnnnnnnnnnnnnnnnnnnnnnnnnnnnnnnnnnnnnnnnnnnnnnnnnnnnnnnnnnnnnnnnnnnnnnnnnnnnnnnnnnnnnnnnnnnnnnnnnnnnnnnnnnnnnnnnnnnnnnnnnnnnnnnnnnnnnnnnnnnnnnnnnnnnnnnnnnnnnnnnnnnnnnnnnnnnnnnnnnnnnnnnnnnnnnnnnnnnnnnnnnnnnnnnnnnnnnnnnnnnnnnnnnnnnnnnnnnnnnnnnnnnnnnnnnnnnnnnnnnnnnnnnnnnnnnnnnnnnnnnnnnnnnnnnnnnnnnnnnnnnnnnnnnnnnnnnnnnnnnnnnnnnnnnnnnnnnnnnnnnnnnnnnnnnnnnnnnnnnnnnnnnnnnnnnnnnnnnnnnnnnnnnnnnnnnnnnnnnnnnnnnnnnnnnnnnnnnnnnnnnnnnnnnnnnnnnnnnnnnnnnnnnnnnnnnnnnnnnnnnnnnnnnnnnnnnnnnnnnnnnnnnnnnnnnnnnnnnnnnnnnnnnnnnnnnnnnnnnnnnnnnnnnnnnnnnnnnnnnnnnnnnnnnnnnnnnnnnnnnnnnnnnnnnnnnnnnnnnnnnnnnnnnnnnnnnnnnnnnnnnnnnnnnnnnnnnnnnnnnnnnnnnnnnnnnnnnnnnnnnnnnnnnnnnnnnnnnnnnnnnnnnnnnnnnnnnnnnnnnnnnnnnnnnnnnnnnnnnnnnnnnnnnnnnnnnnnnnnnnnnnnnnnnnnnnnnnnnnnnnnnnnnnnnnnnnnnnnnnnnnnnnnnnnnnnnnnnnnnnnnnnnnnnnnnnnnnnnnnnnnnnnnnnnnnnnnnnnnnnnnnnnnnnnnnnnnnnnnnnnnnnnnnnnnnnnnnnnnnnnnnnnnnnnnnnnnnnnnnnnnnnnnnnnnnnnnnnnnnnnnnnnnnnnnnnnnnnnnnnnnnnnnnnnnnnnnnnnnnnnnnnnnnnnnnnnnnnnnnnnnnnnnnnnnnnnnnnnnnnnnnnnnnnnnnnnnnnnnnnnnnnnnnnnnnnnnnnnnnnnnnnnnnnnnnnnnnnnnnnnnnnnnnnnnnnnnnnnnnnnnnnnnnnnnnnnnnnnnnnnnnnnnnnnnnnnnnnnnnnnnnnnnnnnnnnnnnnnnnnnnnnnnnnnnnnnnnnnnnnnnnnnnnnnnnnnnnnnnnnnnnnnnnnnnnnnnnnnnnnnnnnnnnnnnnnnnnnnnnnnnnnnnnnnnnnnnnnnnnnnnnnnnnnnnnnnnnnnnnnnnnnnnnnnnnnnnnnnnnnnnnnnnnnnnnnnnnnnnnnnnnnnnnnnnnnnnnnnnnnnnnnnnnnnnnnnnnnnnnnnnnnnnnnnnnnnnnnnnnnnnnnnnnnnnnnnnnnnnnnnnnnnnnnnnnnnnnnnnnnnnnnnnnnnnnnnnnnnnnnnnnnnnnnnnnnnnnnnnnnnnnnnnnnnnnnnnnnnnnnnnnnnnnnnnnnnnnnnnnnnnnnnnnnnnnnnnnnnnnnnnnnnnnnnnnnnnnnnnnnnnnnnnnnnnnnnnnnnnnnnnnnnnnnnnnnnnnnnnnnnnnnnnnnnnnnnnnnnnnnnnnnnnnnnnnnnnnnnnnnnnnnnnnnnnnnnnnnnnnnnnnnnnnnnnnnnnnnnnnnnnnnnnnnnnnnnnnnnnnnnnnnnnnnnnnnnnnnnnnnnnnnnnnnnnnnnnnnnnnnnnnnnnnnnnnnnnnnnnnnnnnnnnnnnnnnnnnnnnnnnnnnnnnnnnnnnnnnnnnnnnnnnnnnnnnnnnnnnnnnnnnnnnnnnnnnnnnnnnnnnnnnnnnnnnnnnnnnnnnnnnnnnnnnnnnnnnnnnnnnnnnnnnnnnnnnnnnnnnnnnnnnnnnnnnnnnnnnnnnnnnnnnnnnnnnnnnnnnnnnnnnnnnnnnnnnnnnnnnnnnnnnnnnnnnnnnnnnnnnnnnnnnnnnnnnnnnnnnnnnnnnnnnnnnnnnnnnnnnnnnnnnnnnnnnnnnnnnnnnnnnnnnnnnnnnnnnnnnnnnnnnnnnnnnnnnnnnnnnnnnnnnnnnnnnnnnnnnnnnnnnnnnnnnnnnnnnnnnnnnnnnnnnnnnnnnnnnnnnnnnnnnnnnnnnnnnnnnnnnnnnnnnnnnnnnnnnnnnnnnnnnnnnnnnnnnnnnnnnnnnnnnnnnnnnnnnnnnnnnnnnnnnnnnnnnnnnnnnnnnnnnnnnnnnnnnnnnnnnnnnnnnnnnnnnnnnnnnnnnnnnnnnnnnnnnnnnnnnnnnnnnnnnnnnnnnnnnnnnnnnnnnnnnnnnnnnnnnnnnnnnnnnnnnnnnnnnnnnnnnnnnnnnnnnnnnnnnnnnnnnnnnnnnnnnnnnnnnnnnnnnnnnnnnnnnnnnnnnnnnnnnnnnnnnnnnnnnnnnnnnnnnnnnnnnnnnnnnnnnnnnnnnnnnnnnnnnnnnnnnnnnnnnnnnnnnnnnnnnnnnnnnnnnnnnnnnnnnnnnnnnnnnnnnnnnnnnnnnnnnnnnnnnnnnnnnnnnnnnnnnnnnnnnnnnnnnnnnnnnnnnnnnnnnnnnnnnnnnnnnnnnnnnnnnnnnnnnnnnnnnnnnnnnnnnnnnnnnnnnnnnnnnnnnnnnnnnnnnnnnnnnnnnnnnnnnnnnnnnnnnnnnnnnnnnnnnnnnnnnnnnnnnnnnnnnnnnnnnnnnnnnnnnnnnnnnnnnnnnnnnnnnnnnnnnnnnnnnnnnnnnnnnnnnnnnnnnnnnnnnnnnnnnnnnnnnnnnnnnnnnnnnnnnnnnnnnnnnnnnnnnnnnnnnnnnnnnnnnnnnnnnnnnnnnnnnnnnnnnnnnnnnnnnnnnnnnnnnnnnnnnnnnnnnnnnnnnnnnnnnnnnnnnnnnnnnnnnnnnnnnnnnnnnnnnnnnnnnnnnnnnnnnnnnnnnnnnnnnnnnnnnnnnnnnnnnnnnnnnnnnnnnnnnnnnnnnnnnnnnnnnnnnnnnnnnnnnnnnnnnnnnnnnnnnnnnnnnnnnnnnnnnnnnnnnnnnnnnnnnnnnnnnnnnnnnnnnnnnnnnnnnnnnnnnnnnnnnnnnnnnnnnnnnnnnnnnnnnnnnnnnnnnnnnnnnnnnnnnnnnnnnnnnnnnnnnnnnnnnnnnnnnnnnnnnnnnnnnnnnnnnnnnnnnnnnnnnnnnnnnnnnnnnnnnnnnnnnnnnnnnnnnnnnnnnnnnnnnnnnnnnnnnnnnnnnnnnnnnnnnnnnnnnnnnnnnnnnnnnnnnnnnnnnnnnnnnnnnnnnnnnnnnnnnnnnnnnnnnnnnnnnnnnnnnnnnnnnnnnnnnnnnnnnnnnnnnnnnnnnnnnnnnnnnnnnnnnnnnnnnnnnnnnnnnnnnnnnnnnnnnnnnnnnnnnnnnnnnnnnnnnnnnnnnnnnnnnnnnnnnnnnnnnnnnnnnnnnnnnnnnnnnnnnnnnnnnnnnnnnnnnnnnnnnnnnnnnnnnnnnnnnnnnnnnnnnnnnnnnnnnnnnnnnnnnnnnnnnnnnnnnnnnnnnnnnnnnnnnnnnnnnnnnnnnnnnnnnnnnnnnnnnnnnnnnnnnnnnnnnnnnnnnnnnnnnnnnnnnnnnnnnnnnnnnnnnnnnnnnnnnnnnnnnnnnnnnnnnnnnnnnnnnnnnnnnnnnnnnnnnnnnnnnnnnnnnnnnnnnnnnnnnnnnnnnnnnnnnnnnnnnnnnnnnnnnnnnnnnnnnnnnnnnnnnnnnnnnnnnnnnnnnnnnnnnnnnnnnnnnnnnnnnnnnnnnnnnnnnnnnnnnnnnnnnnnnnnnnnnnnnnnnnnnnnnnnnnnnnnnnnnnnnnnnnnnnnnnnnnnnnnnnnnnnnnnnnnnnnnnnnnnnnnnnnnnnnnnnnnnnnnnnnnnnnnnnnnnnnnnnnnnnnnnnnnnnnnnnnnnnnnnnnnnnnnnnnnnnnnnnnnnnnnnnnnnnnnnnnnnnnnnnnnnnnnnnnnnnnnnnnnnnnnnnnnnnnnnnnnnnnnnnnnnnnnnnnnnnnnnnnnnnnnnnnnnnnnnnnnnnnnnnnnnnnnnnnnnnnnnnnnnnnnnnnnnnnnnnnnnnnnnnnnnnnnnnnnnnnnnnnnnnnnnnnnnnnnnnnnnnnnnnnnnnnnnnnnnnnnnnnnnnnnnnnnnnnnnnnnnnnnnnnnnnnnnnnnnnnnnnnnnnnnnnnnnnnnnnnnnnnnnnnnnnnnnnnnnnnnnnnnnnnnnnnnnnnnnnnnnnnnnnnnnnnnnnnnnnnnnnnnnnnnnnnnnnnnnnnnnnnnnnnnnnnnnnnnnnnnnnnnnnnnnnnnnnnnnnnnnnnnnnnnnnnnnnnnnnnnnnnnnnnnnnnnnnnnnnnnnnnnnnnnnnnnnnnnnnnnnnnnnnnnnnnnnnnnnnnnnnnnnnnnnnnnnnnnnnnnnnnnnnnnnnnnnnnnnnnnnnnnnnnnnnnnnnnnnnnnnnnnnnnnnnnnnnnnnnnnnnnnnnnnnnnnnnnnnnnnnnnnnnnnnnnnnnnnnnnnnnnnnnnnnnnnnnnnnnnnnnnnnnnnnnnnnnnnnnnnnnnnnnnnnnnnnnnnnnnnnnnnnnnnnnnnnnnnnnnnnnnnnnnnnnnnnnnnnnnnnnnnnnnnnnnnnnnnnnnnnnnnnnnnnnnnnnnnnnnnnnnnnnnnnnnnnnnnnnnnnnnnnnnnnnnnnnnnnnnnnnnnnnnnnnnnnnnnnnnnnnnnnnnnnnnnnnnnnnnnnnnnnnnnnnnnnnnnnnnnnnnnnnnnnnnnnnnnnnnnnnnnnnnnnnnnnnnnnnnnnnnnnnnnnnnnnnnnnnnnnnnnnnnnnnnnnnnnnnnnnnnnnnnnnnnnnnnnnnnnnnnnnnnnnnnnnnnnnnnnnnnnnnnnnnnnnnnnnnnnnnnnnnnnnnnnnnnnnnnnnnnnnnnnnnnnnnnnnnnnnnnnnnnnnnnnnnnnnnnnnnnnnnnnnnnnnnnnnnnnnnnnnnnnnnnnnnnnnnnnnnnnnnnnnnnnnnnnnnnnnnnnnnnnnnnnnnnnnnnnnnnnnnnnnnnnnnnnnnnnnnnnnnnnnnnnnnnnnnnnnnnnnnnnnnnnnnnnnnnnnnnnnnnnnnnnnnnnnnnnnnnnnnnnnnnnnnnnnnnnnnnnnnnnnnnnnnnnnnnnnnnnnnnnnnnnnnnnnnnnnnnnnnnnnnnnnnnnnnnnnnnnnnnnnnnnnnnnnnnnnnnnnnnnnnnnnnnnnnnnnnnnnnnnnnnnnnnnnnnnnnnnnnnnnnnnnnnnnnnnnnnnnnnnnnnnnnnnnnnnnnnnnnnnnnnnnnnnnnnnnnnnnnnnnnnnnnnnnnnnnnnnnnnnnnnnnnnnnnnnnnnnnnnnnnnnnnnnnnnnnnnnnnnnnnnnnnnnnnnnnnnnnnnnnnnnnnnnnnnnnnnnnnnnnnnnnnnnnnnnnnnnnnnnnnnnnnnnnnnnnnnnnnnnnnnnnnnnnnnnnnnnnnnnnnnnnnnnnnnnnnnnnnnnnnnnnnnnnnnnnnnnnnnnnnnnnnnnnnnnnnnnnnnnnnnnnnnnnnnnnnnnnnnnnnnnnnnnnnnnnnnnnnnnnnnnnnnnnnnnnnnnnnnnnnnnnnnnnnnnnnnnnnnnnnnnnnnnnnnnnnnnnnnnnnnnnnnnnnnnnnnnnnnnnnnnnnnnnnnnnnnnnnnnnnnnnnnnnnnnnnnnnnnnnnnnnnnnnnnnnnnnnnnnnnnnnnnnnnnnnnnnnnnnnnnnnnnnnnnnnnnnnnnnnnnnnnnnnnnnnnnnnnnnnnnnnnnnnnnnnnnnnnnnnnnnnnnnnnnnnnnnnnnnnnnnnnnnnnnnnnnnnnnnnnnnnnnnnnnnnnnnnnnnnnnnnnnnnnnnnnnnnnnnnnnnnnnnnnnnnnnnnnnnnnnnnnnnnnnnnnnnnnnnnnnnnnnnnnnnnnnnnnnnnnnnnnnnnnnnnnnnnnnnnnnnnnnnnnnnnnnnnnnnnnnnnnnnnnnnnnnnnnnnnnnnnnnnnnnnnnnnnnnnnnnnnnnnnnnnnnnnnnnnnnnnnnnnnnnnnnnnnnnnnnnnnnnnnnnnnnnnnnnnnnnnnnnnnnnnnnnnnnnnnnnnnnnnnnnnnnnnnnnnnnnnnnnnnnnnnnnnnnnnnnnnnnnnnnnnnnnnnnnnnnnnnnnnnnnnnnnnnnnnnnnnnnnnnnnnnnnnnnnnnnnnnnnnnnnnnnnnnnnnnnnnnnnnnnnnnnnnnnnnnnnnnnnnnnnnnnnnnnnnnnnnnnnnnnnnnnnnnnnnnnnnnnnnnnnnnnnnnnnnnnnnnnnnnnnnnnnnnnnnnnnnnnnnnnnnnnnnnnnnnnnnnnnnnnnnnnnnnnnnnnnnnnnnnnnnnnnnnnnnnnnnnnnnnnnnnnnnnnnnnnnnnnnnnnnnnnnnnnnnnnnnnnnnnnnnnnnnnnnnnnnnnnnnnnnnnnnnnnnnnnnnnnnnnnnnnnnnnnnnnnnnnnnnnnnnnnnnnnnnnnnnnnnnnnnnnnnnnnnnnnnnnnnnnnnnnnnnnnnnnnnnnnnnnnnnnnnnnnnnnnnnnnnnnnnnnnnnnnnnnnnnnnnnnnnnnnnnnnnnnnnnnnnnnnnnnnnnnnnnnnnnnnnnnnnnnnnnnnnnnnnnnnnnnnnnnnnnnnnnnnnnnnnnnnnnnnnnnnnnnnnnnnnnnnnnnnnnnnnnnnnnnnnnnnnnnnnnnnnnnnnnnnnnnnnnnnnnnnnnnnnnnnnnnnnnnnnnnnnnnnnnnnnnnnnnnnnnnnnnnnnnnnnnnnnnnnnnnnnnnnnnnnnnnnnnnnnnnnnnnnnnnnnnnnnnnnnnnnnnnnnnnnnnnnnnnnnnnnnnnnnnnnnnnnnnnnnnnnnnnnnnnnnnnnnnnnnnnnnnnnnnnnnnnnnnnnnnnnnnnnnnnnnnnnnnnnnnnnnnnnnnnnnnnnnnnnnnnnnnnnnnnnnnnnnnnnnnnnnnnnnnnnnnnnnnnnnnnnnnnnnnnnnnnnnnnnnnnnnnnnnnnnnnnnnnnnnnnnnnnnnnnnnnnnnnnnnnnnnnnnnnnnnnnnnnnnnnnnnnnnnnnnnnnnnnnnnnnnnnnnnnnnnnnnnnnnnnnnnnnnnnnnnnnnnnnnnnnnnnnnnnnnnnnnnnnnnnnnnnnnnnnnnnnnnnnnnnnnnnnnnnnnnnnnnnnnnnnnnnnnnnnnnnnnnnnnnnnnnnnnnnnnnnnnnnnnnnnnnnnnnnnnnnnnnnnnnnnnnnnnnnnnnnnnnnnnnnnnnnnnnnnnnnnnnnnnnnnnnnnnnnnnnnnnnnnnnnnnnnnnnnnnnnnnnnnnnnnnnnnnnnnnnnnnnnnnnnnnnnnnnnnnnnnnnnnnnnnnnnnnnnnnnnnnnnnnnnnnnnnnnnnnnnnnnnnnnnnnnnnnnnnnnnnnnnnnnnnnnnnnnnnnnnnnnnnnnnnnnnnnnnnnnnnnnnnnnnnnnnnnnnnnnnnnnnnnnnnnnnnnnnnnnnnnnnnnnnnnnnnnnnnnnnnnnnnnnnnnnnnnnnnnnnnnnnnnnnnnnnnnnnnnnnnnnnnnnnnnnnnnnnnnnnnnnnnnnnnnnnnnnnnnnnnnnnnnnnnnnnnnnnnnnnnnnnnnnnnnnnnnnnnnnnnnnnnnnnnnnnnnnnnnnnnnnnnnnnnnnnnnnnnnnnnnnnnnnnnnnnnnnnnnnnnnnnnnnnnnnnnnnnnnnnnnnnnnnnnnnnnnnnnnnnnnnnnnnnnnnnnnnnnnnnnnnnnnnnnnnnnnnnnnnnnnnnnnnnnnnnnnnnnnnnnnnnnnnnnnnnnnnnnnnnnnnnnnnnnnnnnnnnnnnnnnnnnnnnnnnnnnnnnnnnnnnnnnnnnnnnnnnnnnnnnnnnnnnnnnnnnnnnnnnnnnnnnnnnnnnnnnnnnnnnnnnnnnnnnnnnnnnnnnnnnnnnnnnnnnnnnnnnnnnnnnnnnnnnnnnnnnnnnnnnnnnnnnnnnnnnnnnnnnnnnnnnnnnnnnnnnnnnnnnnnnnnnnnnnnnnnnnnnnnnnnnnnnnnnnnnnnnnnnnnnnnnnnnnnnnnnnnnnnnnnnnnnnnnnnnnnnnnnnnnnnnnnnnnnnnnnnnnnnnnnnnnnnnnnnnnnnnnnnnnnnnnnnnnnnnnnnnnnnnnnnnnnnnnnnnnnnnnnnnnnnnnnnnnnnnnnnnnnnnnnnnnnnnnnnnnnnnnnnnnnnnnnnnnnnnnnnnnnnnnnnnnnnnnnnnnnnnnnnnnnnnnnnnnnnnnnnnnnnnnnnnnnnnnnnnnnnnnnnnnnnnnnnnnnnnnnnnnnnnnnnnnnnnnnnnnnnnnnnnnnnnnnnnnnnnnnnnnnnnnnnnnnnnnnnnnnnnnnnnnnnnnnnnnnnnnnnnnnnnnnnnnnnnnnnnnnnnnnnnnnnnnnnnnnnnnnnnnnnnnnnnnnnnnnnnnnnnnnnnnnnnnnnnnnnnnnnnnnnnnnnnnnnnnnnnnnnnnnnnnnnnnnnnnnnnnnnnnnnnnnnnnnnnnnnnnnnnnnnnnnnnnnnnnnnnnnnnnnnnnnnnnnnnnnnnnnnnnnnnnnnnnnnnnnnnnnnnnnnnnnnnnnnnnnnnnnnnnnnnnnnnnnnnnnnnnnnnnnnnnnnnnnnnnnnnnnnnnnnnnnnnnnnnnnnnnnnnnnnnnnnnnnnnnnnnnnnnnnnnnnnnnnnnnnnnnnnnnnnnnnnnnnnnnnnnnnnnnnnnnnnnnnnnnnnnnnnnnnnnnnnnnnnnnnnnnnnnnnnnnnnnnnnnnnnnnnnnnnnnnnnnnnnnnnnnnnnnnnnnnnnnnnnnnnnnnnnnnnnnnnnnnnnnnnnnnnnnnnnnnnnnnnnnnnnnnnnnnnnnnnnnnnnnnnnnnnnnnnnnnnnnnnnnnnnnnnnnnnnnnnnnnnnnnnnnnnnnnnnnnnnnnnnnnnnnnnnnnnnnnnnnnnnnnnnnnnnnnnnnnnnnnnnnnnnnnnnnnnnnnnnnnnnnnnnnnnnnnnnnnnnnnnnnnnnnnnnnnnnnnnnnnnnnnnnnnnnnnnnnnnnnnnnnnnnnnnnnnnnnnnnnnnnnnnnnnnnnnnnnnnnnnnnnnnnnnnnnnnnnnnnnnnnnnnnnnnnnnnnnnnnnnnnnnnnnnnnnnnnnnnnnnnnnnnnnnnnnnnnnnnnnnnnnnnnnnnnnnnnnnnnnnnnnnnnnnnnnnnnnnnnnnnnnnnnnnnnnnnnnnnnnnnnnnnnnnnnnnnnnnnnnnnnnnnnnnnnnnnnnnnnnnnnnnnnnnnnnnnnnnnnnnnnnnnnnnnnnnnnnnnnnnnnnnnnnnnnnnnnnnnnnnnnnnnnnnnnnnnnnnnnnnnnnnnnnnnnnnnnnnnnnnnnnnnnnnnnnnnnnnnnnnnnnnnnnnnnnnnnnnnnnnnnnnnnnnnnnnnnnnnnnnnnnnnnnnnnnnnnnnnnnnnnnnnnnnnnnnnnnnnnnnnnnnnnnnnnnnnnnnnnnnnnnnnnnnnnnnnnnnnnnnnnnnnnnnnnnnnnnnnnnnnnnnnnnnnnnnnnnnnnnnnnnnnnnnnnnnnnnnnnnnnnnnnnnnnnnnnnnnnnnnnnnnnnnnnnnnnnnnnnnnnnnnnnnnnnnnnnnnnnnnnnnnnnnnnnnnnnnnnnnnnnnnnnnnnnnnnnnnnnnnnnnnnnnnnnnnnnnnnnnnnnnnnnnnnnnnnnnnnnnnnnnnnnnnnnnnnnnnnnnnnnnnnnnnnnnnnnnnnnnnnnnnnnnnnnnnnnnnnnnnnnnnnnnnnnnnnnnnnnnnnnnnnnnnnnnnnnnnnnnnnnnnnnnnnnnnnnnnnnnnnnnnnnnnnnnnnnnnnnnnnnnnnnnnnnnnnnnnnnnnnnnnnnnnnnnnnnnnnnnnnnnnnnnnnnnnnnnnnnnnnnnnnnnnnnnnnnnnnnnnnnnnnnnnnnnnnnnnnnnnnnnnnnnnnnnnnnnnnnnnnnnnnnnnnnnnnnnnnnnnnnnnnnnnnnnnnnnnnnnnnnnnnnnnnnnnnnnnnnnnnnnnnnnnnnnnnnnnnnnnnnnnnnnnnnnnnnnnnnnnnnnnnnnnnnnnnnnnnnnnnnnnnnnnnnnnnnnnnnnnnnnnnnnnnnnnnnnnnnnnnnnnnnnnnnnnnnnnnnnnnnnnnnnnnnnnnnnnnnnnnnnnnnnnnnnnnnnnnnnnnnnnnnnnnnnnnnnnnnnnnnnnnnnnnnnnnnnnnnnnnnnnnnnnnnnnnnnnnnnnnnnnnnnnnnnnnnnnnnnnnnnnnnnnnnnnnnnnnnnnnnnnnnnnnnnnnnnnnnnnnnnnnnnnnnnnnnnnnnnnnnnnnnnnnnnnnnnnnnnnnnnnnnnnnnnnnnnnnnnnnnnnnnnnnnnnnnnnnnnnnnnnnnnnnnnnnnnnnnnnnnnnnnnnnnnnnnnnnnnnnnnnnnnnnnnnnnnnnnnnnnnnnnnnnnnnnnnnnnnnnnnnnnnnnnnnnnnnnnnnnnnnnnnnnnnnnnnnnnnnnnnnnnnnnnnnnnnnnnnnnnnnnnnnnnnnnnnnnnnnnnnnnnnnnnnnnnnnnnnnnnnnnnnnnnnnnnnnnnnnnnnnnnnnnnnnnnnnnnnnnnnnnnnnnnnnnnnnnnnnnnnnnnnnnnnnnnnnnnnnnnnnnnnnnnnnnnnnnnnnnnnnnnnnnnnnnnnnnnnnnnnnnnnnnnnnnnnnnnnnnnnnnnnnnnnnnnnnnnnnnnnnnnnnnnnnnnnnnnnnnnnnnnnnnnnnnnnnnnnnnnnnnnnnnnnnnnnnnnnnnnnnnnnnnnnnnnnnnnnnnnnnnnnnnnnnnnnnnnnnnnnnnnnnnnnnnnnnnnnnnnnnnnnnnnnnnnnnnnnnnnnnnnnnnnnnnnnnnnnnnnnnnnnnnnnnnnnnnnnnnnnnnnnnnnnnnnnnnnnnnnnnnnnnnnnnnnnnnnnnnnnnnnnnnnnnnnnnnnnnnnnnnnnnnnnnnnnnnnnnnnnnnnnnnnnnnnnnnnnnnnnnnnnnnnnnnnnnnnnnnnnnnnnnnnnnnnnnnnnnnnnnnnnnnnnnnnnnnnnnnnnnnnnnnnnnnnnnnnnnnnnnnnnnnnnnnnnnnnnnnnnnnnnnnnnnnnnnnnnnnnnnnnnnnnnnnnnnnnnnnnnnnnnnnnnnnnnnnnnnnnnnnnnnnnnnnnnnnnnnnnnnnnnnnnnnnnnnnnnnnnnnnnnnnnnnnnnnnnnnnnnnnnnnnnnnnnnnnnnnnnnnnnnnnnnnnnnnnnnnnnnnnnnnnnnnnnnnnnnnnnnnnnnnnnnnnnnnnnnnnnnnnnnnnnnnnnnnnnnnnnnnnnnnnnnnnnnnnnnnnnnnnnnnnnnnnnnnnnnnnnnnnnnnnnnnnnnnnnnnnnnnnnnnnnnnnnnnnnnnnnnnnnnnnnnnnnnnnnnnnnnnnnnnnnnnnnnnnnnnnnnnnnnnnnnnnnnnnnnnnnnnnnnnnnnnnnnnnnnnnnnnnnnnnnnnnnnnnnnnnnnnnnnnnnnnnnnnnnnnnnnnnnnnnnnnnnnnnnnnnnnnnnnnnnnnnnnnnnnnnnnnnnnnnnnnnnnnnnnnnnnnnnnnnnnnnnnnnnnnnnnnnnnnnnnnnnnnnnnnnnnnnnnnnnnnnnnnnnnnnnnnnnnnnnnnnnnnnnnnnnnnnnnnnnnnnnnnnnnnnnnnnnnnnnnnnnnnnnnnnnnnnnnnnnnnnnnnnnnnnnnnnnnnnnnnnnnnnnnnnnnnnnnnnnnnnnnnnnnnnnnnnnnnnnnnnnnnnnnnnnnnnnnnnnnnnnnnnnnnnnnnnnnnnnnnnnnnnnnnnnnnnnnnnnnnnnnnnnnnnnnnnnnnnnnnnnnnnnnnnnnnnnnnnnnnnnnnnnnnnnnnnnnnnnnnnnnnnnnnnnnnnnnnnnnnnnnnnnnnnnnnnnnnnnnnnnnnnnnnnnnnnnnnnnnnnnnnnnnnnnnnnnnnnnnnnnnnnnnnnnnnnnnnnnnnnnnnnnnnnnnnnnnnnnnnnnnnnnnnnnnnnnnnnnnnnnnnnnnnnnnnnnnnnnnnnnnnnnnnnnnnnnnnnnnnnnnnnnnnnnnnnnnnnnnnnnnnnnnnnnnnnnnnnnnnnnnnnnnnnnnnnnnnnnnnnnnnnnnnnnnnnnnnnnnnnnnnnnnnnnnnnnnnnnnnnnnnnnnnnnnnnnnnnnnnnnnnnnnnnnnnnnnnnnnnnnnnnnnnnnnnnnnnnnnnnnnnnnnnnnnnnnnnnnnnnnnnnnnnnnnnnnnnnnnnnnnnnnnnnnnnnnnnnnnnnnnnnnnnnnnnnnnnnnnnnnnnnnnnnnnnnnnnnnnnnnnnnnnnnnnnnnnnnnnnnnnnnnnnnnnnnnnnnnnnnnnnnnnnnnnnnnnnnnnnnnnnnnnnnnnnnnnnnnnnnnnnnnnnnnnnnnnnnnnnnnnnnnnnnnnnnnnnnnnnnnnnnnnnnnnnnnnnnnnnnnnnnnnnnnnnnnnnnnnnnnnnnnnnnnnnnnnnnnnnnnnnnnnnnnnnnnnnnnnnnnnnnnnnnnnnnnnnnnnnnnnnnnnnnnnnnnnnnnnnnnnnnnnnnnnnnnnnnnnnnnnnnnnnnnnnnnnnnnnnnnnnnnnnnnnnnnnnnnnnnnnnnnnnnnnnnnnnnnnnnnnnnnnnnnnnnnnnnnnnnnnnnnnnnnnnnnnnnnnnnnnnnnnnnnnnnnnnnnnnnnnnnnnnnnnnnnnnnnnnnnnnnnnnnnnnnnnnnnnnnnnnnnnnnnnnnnnnnnnnnnnnnnnnnnnnnnnnnnnnnnnnnnnnnnnnnnnnnnnnnnnnnnnnnnnnnnnnnnnnnnnnnnnnnnnnnnnnnnnnnnnnnnnnnnnnnnnnnnnnnnnnnnnnnnnnnnnnnnnnnnnnnnnnnnnnnnnnnnnnnnnnnnnnnnnnnnnnnnnnnnnnnnnnnnnnnnnnnnnnnnnnnnnnnnnnnnnnnnnnnnnnnnnnnnnnnnnnnnnnnnnnnnnnnnnnnnnnnnnnnnnnnnnnnnnnnnnnnnnnnnnnnnnnnnnnnnnnnnnnnnnnnnnnnnnnnnnnnnnnnnnnnnnnnnnnnnnnnnnnnnnnnnnnnnnnnnnnnnnnnnnnnnnnnnnnnnnnnnnnnnnnnnnnnnnnnnnnnnnnnnnnnnnnnnnnnnnnnnnnnnnnnnnnnnnnnnnnnnnnnnnnnnnnnnnnnnnnnnnnnnnnnnnnnnnnnnnnnnnnnnnnnnnnnnnnnnnnnnnnnnnnnnnnnnnnnnnnnnnnnnnnnnnnnnnnnnnnnnnnnnnnnnnnnnnnnnnnnnnnnnnnnnnnnnnnnnnnnnnnnnnnnnnnnnnnnnnnnnnnnnnnnnnnnnnnnnnnnnnnnnnnnnnnnnnnnnnnnnnnnnnnnnnnnnnnnnnnnnnnnnnnnnnnnnnnnnnnnnnnnnnnnnnnnnnnnnnnnnnnnnnnnnnnnnnnnnnnnnnnnnnnnnnnnnnnnnnnnnnnnnnnnnnnnnnnnnnnnnnnnnnnnnnnnnnnnnnnnnnnnnnnnnnnnnnnnnnnnnnnnnnnnnnnnnnnnnnnnnnnnnnnnnnnnnnnnnnnnnnnnnnnnnnnnnnnnnnnnnnnnnnnnnnnnnnnnnnnnnnnnnnnnnnnnnnnnnnnnnnnnnnnnnnnnnnnnnnnnnnnnnnnnnnnnnnnnnnnnnnnnnnnnnnnnnnnnnnnnnnnnnnnnnnnnnnnnnnnnnnnnnnnnnnnnnnnnnnnnnnnnnnnnnnnnnnnnnnnnnnnnnnnnnnnnnnnnnnnnnnnnnnnnnnnnnnnnnnnnnnnnnnnnnnnnnnnnnnnnnnnnnnnnnnnnnnnnnnnnnnnnnnnnnnnnnnnnnnnnnnnnnnnnnnnnnnnnnnnnnnnnnnnnnnnnnnnnnnnnnnnnnnnnnnnnnnnnnnnnnnnnnnnnnnnnnnnnnnnnnnnnnnnnnnnnnnnnnnnnnnnnnnnnnnnnnnnnnnnnnnnnnnnnnnnnnnnnnnnnnnnnnnnnnnnnnnnnnnnnnnnnnnnnnnnnnnnnnnnnnnnnnnnnnnnnnnnnnnnnnnnnnnnnnnnnnnnnnnnnnnnnnnnnnnnnnnnnnnnnnnnnnnnnnnnnnnnnnnnnnnnnnnnnnnnnnnnnnnnnnnnnnnnnnnnnnnnnnnnnnnnnnnnnnnnnnnnnnnnnnnnnnnnnnnnnnnnnnnnnnnnnnnnnnnnnnnnnnnnnnnnnnnnnnnnnnnnnnnnnnnnnnnnnnnnnnnnnnnnnnnnnnnnnnnnnnnnnnnnnnnnnnnnnnnnnnnnnnnnnnnnnnnnnnnnnnnnnnnnnnnnnnnnnnnnnnnnnnnnnnnnnnnnnnnnnnnnnnnnnnnnnnnnnnnnnnnnnnnnnnnnnnnnnnnnnnnnnnnnnnnnnnnnnnnnnnnnnnnnnnnnnnnnnnnnnnnnnnnnnnnnnnnnnnnnnnnnnnnnnnnnnnnnnnnnnnnnnnnnnnnnnnnnnnnnnnnnnnnnnnnnnnnnnnnnnnnnnnnnnnnnnnnnnnnnnnnnnnnnnnnnnnnnnnnnnnnnnnnnnnnnnnnnnnnnnnnnnnnnnnnnnnnnnnnnnnnnnnnnnnnnnnnnnnnnnnnnnnnnnnnnnnnnnnnnnnnnnnnnnnnnnnnnnnnnnnnnnnnnnnnnnnnnnnnnnnnnnnnnnnnnnnnnnnnnnnnnnnnnnnnnnnnnnnnnnnnnnnnnnnnnnnnnnnnnnnnnnnnnnnnnnnnnnnnnnnnnnnnnnnnnnnnnnnnnnnnnnnnnnnnnnnnnnnnnnnnnnnnnnnnnnnnnnnnnnnnnnnnnnnnnnnnnnnnnnnnnnnnnnnnnnnnnnnnnnnnnnnnnnnnnnnnnnnnnnnnnnnnnnnnnnnnnnnnnnnnnnnnnnnnnnnnnnnnnnnnnnnnnnnnnnnnnnnnnnnnnnnnnnnnnnnnnnnnnnnnnnnnnnnnnnnnnnnnnnnnnnnnnnnnnnnnnnnnnnnnnnnnnnnnnnnnnnnnnnnnnnnnnnnnnnnnnnnnnnnnnnnnnnnnnnnnnnnnnnnnnnnnnnnnnnnnnnnnnnnnnnnnnnnnnnnnnnnnnnnnnnnnnnnnnnnnnnnnnnnnnnnnnnnnnnnnnnnnnnnnnnnnnnnnnnnnnnnnnnnnnnnnnnnnnnnnnnnnnnnnnnnnnnnnnnnnnnnnnnnnnnnnnnnnnnnnnnnnnnnnnnnnnnnnnnnnnnnnnnnnnnnnnnnnnnnnnnnnnnnnnnnnnnnnnnnnnnnnnnnnnnnnnnnnnnnnnnnnnnnnnnnnnnnnnnnnnnnnnnnnnnnnnnnnnnnnnnnnnnnnnnnnnnnnnnnnnnnnnnnnnnnnnnnnnnnnnnnnnnnnnnnnnnnnnnnnnnnnnnnnnnnnnnnnnnnnnnnnnnnnnnnnnnnnnnnnnnnnnnnnnnnnnnnnnnnnnnnnnnnnnnnnnnnnnnnnnnnnnnnnnnnnnnnnnnnnnnnnnnnnnnnnnnnnnnnnnnnnnnnnnnnnnnnnnnnnnnnnnnnnnnnnnnnnnnnnnnnnnnnnnnnnnnnnnnnnnnnnnnnnnnnnnnnnnnnnnnnnnnnnnnnnnnnnnnnnnnnnnnnnnnnnnnnnnnnnnnnnnnnnnnnnnnnnnnnnnnnnnnnnnnnnnnnnnnnnnnnnnnnnnnnnnnnnnnnnnnnnnnnnnnnnnnnnnnnnnnnnnnnnnnnnnnnnnnnnnnnnnnnnnnnnnnnnnnnnnnnnnnnnnnnnnnnnnnnnnnnnnnnnnnnnnnnnnnnnnnnnnnnnnnnnnnnnnnnnnnnnnnnnnnnnnnnnnnnnnnnnnnnnnnnnnnnnnnnnnnnnnnnnnnnnnnnnnnnnnnnnnnnnnnnnnnnnnnnnnnnnnnnnnnnnnnnnnnnnnnnnnnnnnnnnnnnnnnnnnnnnnnnnnnnnnnnnnnnnnnnnnnnnnnnnnnnnnnnnnnnnnnnnnnnnnnnnnnnnnnnnnnnnnnnnnnnnnnnnnnnnnnnnnnnnnnnnnnnnnnnnnnnnnnnnnnnnnnnnnnnnnnnnnnnnnnnnnnnnnnnnnnnnnnnnnnnnnnnnnnnnnnnnnnnnnnnnnnnnnnnnnnnnnnnnnnnnnnnnnnnnnnnnnnnnnnnnnnnnnnnnnnnnnnnnnnnnnnnnnnnnnnnnnnnnnnnnnnnnnnnnnnnnnnnnnnnnnnnnnnnnnnnnnnnnnnnnnnnnnnnnnnnnnnnnnnnnnnnnnnnnnnnnnnnnnnnnnnnnnnnnnnnnnnnnnnnnnnnnnnnnnnnnnnnnnnnnnnnnnnnnnnnnnnnnnnnnnnnnnnnnnnnnnnnnnnnnnnnnnnnnnnnnnnnnnnnnnnnnnnnnnnnnnnnnnnnnnnnnnnnnnnnnnnnnnnnnnnnnnnnnnnnnnnnnnnnnnnnnnnnnnnnnnnnnnnnnnnnnnnnnnnnnnnnnnnnnnnnnnnnnnnnnnnnnnnnnnnnnnnnnnnnnnnnnnnnnnnnnnnnnnnnnnnnnnnnnnnnnnnnnnnnnnnnnnnnnnnnnnnnnnnnnnnnnnnnnnnnnnnnnnnnnnnnnnnnnnnnnnnnnnnnnnnnnnnnnnnnnnnnnnnnnnnnnnnnnnnnnnnnnnnnnnnnnnnnnnnnnnnnnnnnnnnnnnnnnnnnnnnnnnnnnnnnnnnnnnnnnnnnnnnnnnnnnnnnnnnnnnnnnnnnnnnnnnnnnnnnnnnnnnnnnnnnnnnnnnnnnnnnnnnnnnnnnnnnnnnnnnnnnnnnnnnnnnnnnnnnnnnnnnnnnnnnnnnnnnnnnnnnnnnnnnnnnnnnnnnnnnnnnnnnnnnnnnnnnnnnnnnnnnnnnnnnnnnnnnnnnnnnnnnnnnnnnnnnnnnnnnnnnnnnnnnnnnnnnnnnnnnnnnnnnnnnnnnnnnnnnnnnnnnnnnnnnnnnnnnnnnnnnnnnnnnnnnnnnnnnnnnnnnnnnnnnnnnnnnnnnnnnnnnnnnnnnnnnnnnnnnnnnnnnnnnnnnnnnnnnnnnnnnnnnnnnnnnnnnnnnnnnnnnnnnnnnnnnnnnnnnnnnnnnnnnnnnnnnnnnnnnnnnnnnnnnnnnnnnnnnnnnnnnnnnnnnnnnnnnnnnnnnnnnnnnnnnnnnnnnnnnnnnnnnnnnnnnnnnnnnnnnnnnnnnnnnnnnnnnnnnnnnnnnnnnnnnnnnnnnnnnnnnnnnnnnnnnnnnnnnnnnnnnnnnnnnnnnnnnnnnnnnnnnnnnnnnnnnnnnnnnnnnnnnnnnnnnnnnnnnnnnnnnnnnnnnnnnnnnnnnnnnnnnnnnnnnnnnnnnnnnnnnnnnnnnnnnnnnnnnnnnnnnnnnnnnnnnnnnnnnnnnnnnnnnnnnnnnnnnnnnnnnnnnnnnnnnnnnnnnnnnnnnnnnnnnnnnnnnnnnnnnnnnnnnnnnnnnnnnnnnnnnnnnnnnnnnnnnnnnnnnnnnnnnnnnnnnnnnnnnnnnnnnnnnnnnnnnnnnnnnnnnnnnnnnnnnnnnnnnnnnnnnnnnnnnnnnnnnnnnnnnnnnnnnnnnnnnnnnnnnnnnnnnnnnnnnnnnnnnnnnnnnnnnnnnnnnnnnnnnnnnnnnnnnnnnnnnnnnnnnnnnnnnnnnnnnnnnnnnnnnnnnnnnnnnnnnnnnnnnnnnnnnnnnnnnnnnnnnnnnnnnnnnnnnnnnnnnnnnnnnnnnnnnnnnnnnnnnnnnnnnnnnnnnnnnnnnnnnnnnnnnnnnnnnnnnnnnnnnnnnnnnnnnnnnnnnnnnnnnnnnnnnnnnnnnnnnnnnnnnnnnnnnnnnnnnnnnnnnnnnnnnnnnnnnnnnnnnnnnnnnnnnnnnnnnnnnnnnnnnnnnnnnnnnnnnnnnnnnnnnnnnnnnnnnnnnnnnnnnnnnnnnnnnnnnnnnnnnnnnnnnnnnnnnnnnnnnnnnnnnnnnnnnnnnnnnnnnnnnnnnnnnnnnnnnnnnnnnnnnnnnnnnnnnnnnnnnnnnnnnnnnnnnnnnnnnnnnnnnnnnnnnnnnnnnnnnnnnnnnnnnnnnnnnnnnnnnnnnnnnnnnnnnnnnnnnnnnnnnnnnnnnnnnnnnnnnnnnnnnnnnnnnnnnnnnnnnnnnnnnnnnnnnnnnnnnnnnnnnnnnnnnnnnnnnnnnnnnnnnnnnnnnnnnnnnnnnnnnnnnnnnnnnnnnnnnnnnnnnnnnnnnnnnnnnnnnnnnnnnnnnnnnnnnnnnnnnnnnnnnnnnnnnnnnnnnnnnnnnnnnnnnnnnnnnnnnnnnnnnnnnnnnnnnnnnnnnnnnnnnnnnnnnnnnnnnnnnnnnnnnnnnnnnnnnnnnnnnnnnnnnnnnnnnnnnnnnnnnnnnnnnnnnnnnnnnnnnnnnnnnnnnnnnnnnnnnnnnnnnnnnnnnnnnnnnnnnnnnnnnnnnnnnnnnnnnnnnnnnnnnnnnnnnnnnnnnnnnnnnnnnnnnnnnnnnnnnnnnnnnnnnnnnnnnnnnnnnnnnnnnnnnnnnnnnnnnnnnnnnnnnnnnnnnnnnnnnnnnnnnnnnnnnnnnnnnnnnnnnnnnnnnnnnnnnnnnnnnnnnnnnnnnnnnnnnnnnnnnnnnnnnnnnnnnnnnnnnnnnnnnnnnnnnnnnnnnnnnnnnnnnnnnnnnnnnnnnnnnnnnnnnnnnnnnnnnnnnnnnnnnnnnnnnnnnnnnnnnnnnnnnnnnnnnnnnnnnnnnnnnnnnnnnnnnnnnnnnnnnnnnnnnnnnnnnnnnnnnnnnnnnnnnnnnnnnnnnnnnnnnnnnnnnnnnnnnnnnnnnnnnnnnnnnnnnnnnnnnnnnnnnnnnnnnnnnnnnnnnnnnnnnnnnnnnnnnnnnnnnnnnnnnnnnnnnnnnnnnnnnnnnnnnnnnnnnnnnnnnnnnnnnnnnnnnnnnnnnnnnnnnnnnnnnnnnnnnnnnnnnnnnnnnnnnnnnnnnnnnnnnnnnnnnnnnnnnnnnnnnnnnnnnnnnnnnnnnnnnnnnnnnnnnnnnnnnnnnnnnnnnnnnnnnnnnnnnnnnnnnnnnnnnnnnnnnnnnnnnnnnnnnnnnnnnnnnnnnnnnnnnnnnnnnnnnnnnnnnnnnnnnnnnnnnnnnnnnnnnnnnnnnnnnnnnnnnnnnnnnnnnnnnnnnnnnnnnnnnnnnnnnnnnnnnnnnnnnnnnnnnnnnnnnnnnnnnnnnnnnnnnnnnnnnnnnnnnnnnnnnnnnnnnnnnnnnnnnnnnnnnnnnnnnnnnnnnnnnnnnnnnnnnnnnnnnnnnnnnnnnnnnnnnnnnnnnnnnnnnnnnnnnnnnnnnnnnnnnnnnnnnnnnnnnnnnnnnnnnnnnnnnnnnnnnnnnnnnnnnnnnnnnnnnnnnnnnnnnnnnnnnnnnnnnnnnnnnnnnnnnnnnnnnnnnnnnnnnnnnnnnnnnnnnnnnnnnnnnnnnnnnnnnnnnnnnnnnnnnnnnnnnnnnnnnnnnnnnnnnnnnnnnnnnnnnnnnnnnnnnnnnnnnnnnnnnnnnnnnnnnnnnnnnnnnnnnnnnnnnnnnnnnnnnnnnnnnnnnnnnnnnnnnnnnnnnnnnnnnnnnnnnnnnnnnnnnnnnnnnnnnnnnnnnnnnnnnnnnnnnnnnnnnnnnnnnnnnnnnnnnnnnnnnnnnnnnnnnnnnnnnnnnnnnnnnnnnnnnnnnnnnnnnnnnnnnnnnnnnnnnnnnnnnnnnnnnnnnnnnnnnnnnnnnnnnnnnnnnnnnnnnnnnnnnnnnnnnnnnnnnnnnnnnnnnnnnnnnnnnnnnnnnnnnnnnnnnnnnnnnnnnnnnnnnnnnnnnnnnnnnnnnnnnnnnnnnnnnnnnnnnnnnnnnnnnnnnnnnnnnnnnnnnnnnnnnnnnnnnnnnnnnnnnnnnnnnnnnnnnnnnnnnnnnnnnnnnnnnnnnnnnnnnnnnnnnnnnnnnnnnnnnnnnnnnnnnnnnnnnnnnnnnnnnnnnnnnnnnnnnnnnnnnnnnnnnnnnnnnnnnnnnnnnnnnnnnnnnnnnnnnnnnnnnnnnnnnnnnnnnnnnnnnnnnnnnnnnnnnnnnnnnnnnnnnnnnnnnnnnnnnnnnnnnnnnnnnnnnnnnnnnnnnnnnnnnnnnnnnnnnnnnnnnnnnnnnnnnnnnnnnnnnnnnnnnnnnnnnnnnnnnnnnnnnnnnnnnnnnnnnnnnnnnnnnnnnnnnnnnnnnnnnnnnnnnnnnnnnnnnnnnnnnnnnnnnnnnnnnnnnnnnnnnnnnnnnnnnnnnnnnnnnnnnnnnnnnnnnnnnnnnnnnnnnnnnnnnnnnnnnnnnnnnnnnnnnnnnnnnnnnnnnnnnnnnnnnnnnnnnnnnnnnnnnnnnnnnnnnnnnnnnnnnnnnnnnnnnnnnnnnnnnnnnnnnnnnnnnnnnnnnnnnnnnnnnnnnnnnnnnnnnnnnnnnnnnnnnnnnnnnnnnnnnnnnnnnnnnnnnnnnnnnnnnnnnnnnnnnnnnnnnnnnnnnnnnnnnnnnnnnnnnnnnnnnnnnnnnnnnnnnnnnnnnnnnnnnnnnnnnnnnnnnnnnnnnnnnnnnnnnnnnnnnnnnnnnnnnnnnnnnnnnnnnnnnnnnnnnnnnnnnnnnnnnnnnnnnnnnnnnnnnnnnnnnnnnnnnnnnnnnnnnnnnnnnnnnnnnnnnnnnnnnnnnnnnnnnnnnnnnnnnnnnnnnnnnnnnnnnnnnnnnnnnnnnnnnnnnnnnnnnnnnnnnnnnnnnnnnnnnnnnnnnnnnnnnnnnnnnnnnnnnnnnnnnnnnnnnnnnnnnnnnnnnnnnnnnnnnnnnnnnnnnnnnnnnnnnnnnnnnnnnnnnnnnnnnnnnnnnnnnnnnnnnnnnnnnnnnnnnnnnnnnnnnnnnnnnnnnnnnnnnnnnnnnnnnnnnnnnnnnnnnnnnnnnnnnnnnnnnnnnnnnnnnnnnnnnnnnnnnnnnnnnnnnnnnnnnnnnnnnnnnnnnnnnnnnnnnnnnnnnnnnnnnnnnnnnnnnnnnnnnnnnnnnnnnnnnnnnnnnnnnnnnnnnnnnnnnnnnnnnnnnnnnnnnnnnnnnnnnnnnnnnnnnnnnnnnnnnnnnnnnnnnnnnnnnnnnnnnnnnnnnnnnnnnnnnnnnnnnnnnnnnnnnnnnnnnnnnnnnnnnnnnnnnnnnnnnnnnnnnnnnnnnnnnnnnnnnnnnnnnnnnnnnnnnnnnnnnnnnnnnnnnnnnnnnnnnnnnnnnnnnnnnnnnnnnnnnnnnnnnnnnnnnnnnnnnnnnnnnnnnnnnnnnnnnnnnnnnnnnnnnnnnnnnnnnnnnnnnnnnnnnnnnnnnnnnnnnnnnnnnnnnnnnnnnnnnnnnnnnnnnnnnnnnnnnnnnnnnnnnnnnnnnnnnnnnnnnnnnnnnnnnnnnnnnnnnnnnnnnnnnnnnnnnnnnnnnnnnnnnnnnnnnnnnnnnnnnnnnnnnnnnnnnnnnnnnnnnnnnnnnnnnnnnnnnnnnnnnnnnnnnnnnnnnnnnnnnnnnnnnnnnnnnnnnnnnnnnnnnnnnnnnnnnnnnnnnnnnnnnnnnnnnnnnnnnnnnnnnnnnnnnnnnnnnnnnnnnnnnnnnnnnnnnnnnnnnnnnnnnnnnnnnnnnnnnnnnnnnnnnnnnnnnnnnnnnnnnnnnnnnnnnnnnnnnnnnnnnnnnnnnnnnnnnnnnnnnnnnnnnnnnnnnnnnnnnnnnnnnnnnnnnnnnnnnnnnnnnnnnnnnnnnnnnnnnnnnnnnnnnnnnnnnnnnnnnnnnnnnnnnnnnnnnnnnnnnnnnnnnnnnnnnnnnnnnnnnnnnnnnnnnnnnnnnnnnnnnnnnnnnnnnnnnnnnnnnnnnnnnnnnnnnnnnnnnnnnnnnnnnnnnnnnnnnnnnnnnnnnnnnnnnnnnnnnnnnnnnnnnnnnnnnnnnnnnnnnnnnnnnnnnnnnnnnnnnnnnnnnnnnnnnnnnnnnnnnnnnnnnnnnnnnnnnnnnnnnnnnnnnnnnnnnnnnnnnnnnnnnnnnnnnnnnnnnnnnnnnnnnnnnnnnnnnnnnnnnnnnnnnnnnnnnnnnnnnnnnnnnnnnnnnnnnnnnnnnnnnnnnnnnnnnnnnnnnnnnnnnnnnnnnnnnnnnnnnnnnnnnnnnnnnnnnnnnnnnnnnnnnnnnnnnnnnnnnnnnnnnnnnnnnnnnnnnnnnnnnnnnnnnnnnnnnnnnnnnnnnnnnnnnnnnnnnnnnnnnnnnnnnnnnnnnnnnnnnnnnnnnnnnnnnnnnnnnnnnnnnnnnnnnnnnnnnnnnnnnnnnnnnnnnnnnnnnnnnnnnnnnnnnnnnnnnnnnnnnnnnnnnnnnnnnnnnnnnnnnnnnnnnnnnnnnnnnnnnnnnnnnnnnnnnnnnnnnnnnnnnnnnnnnnnnnnnnnnnnnnnnnnnnnnnnnnnnnnnnnnnnnnnnnnnnnnnnnnnnnnnnnnnnnnnnnnnnnnnnnnnnnnnnnnnnnnnnnnnnnnnnnnnnnnnnnnnnnnnnnnnnnnnnnnnnnnnnnnnnnnnnnnnnnnnnnnnnnnnnnnnnnnnnnnnnnnnnnnnnnnnnnnnnnnnnnnnnnnnnnnnnnnnnnnnnnnnnnnnnnnnnnnnnnnnnnnnnnnnnnnnnnnnnnnnnnnnnnnnnnnnnnnnnnnnnnnnnnnnnnnnnnnnnnnnnnnnnnnnnnnnnnnnnnnnnnnnnnnnnnnnnnnnnnnnnnnnnnnnnnnnnnnnnnnnnnnnnnnnnnnnnnnnnnnnnnnnnnnnnnnnnnnnnnnnnnnnnnnnnnnnnnnnnnnnnnnnnnnnnnnnnnnnnnnnnnnnnnnnnnnnnnnnnnnnnnnnnnnnnnnnnnnnnnnnnnnnnnnnnnnnnnnnnnnnnnnnnnnnnnnnnnnnnnnnnnnnnnnnnnnnnnnnnnnnnnnnnnnnnnnnnnnnnnnnnnnnnnnnnnnnnnnnnnnnnnnnnnnnnnnnnnnnnnnnnnnnnnnnnnnnnnnnnnnnnnnnnnnnnnnnnnnnnnnnnnnnnnnnnnnnnnnnnnnnnnnnnnnnnnnnnnnnnnnnnnnnnnnnnnnnnnnnnnnnnnnnnnnnnnnnnnnnnnnnnnnnnnnnnnnnnnnnnnnnnnnnnnnnnnnnnnnnnnnnnnnnnnnnnnnnnnnnnnnnnnnnnnnnnnnnnnnnnnnnnnnnnnnnnnnnnnnnnnnnnnnnnnnnnnnnnnnnnnnnnnnnnnnnnnnnnnnnnnnnnnnnnnnnnnnnnnnnnnnnnnnnnnnnnnnnnnnnnnnnnnnnnnnnnnnnnnnnnnnnnnnnnnnnnnnnnnnnnnnnnnnnnnnnnnnnnnnnnnnnnnnnnnnnnnnnnnnnnnnnnnnnnnnnnnnnnnnnnnnnnnnnnnnnnnnnnnnnnnnnnnnnnnnnnnnnnnnnnnnnnnnnnnnnnnnnnnnnnnnnnnnnnnnnnnnnnnnnnnnnnnnnnnnnnnnnnnnnnnnnnnnnnnnnnnnnnnnnnnnnnnnnnnnnnnnnnnnnnnnnnnnnnnnnnnnnnnnnnnnnnnnnnnnnnnnnnnnnnnnnnnnnnnnnnnnnnnnnnnnnnnnnnnnnnnnnnnnnnnnnnnnnnnnnnnnnnnnnnnnnnnnnnnnnnnnnnnnnnnnnnnnnnnnnnnnnnnnnnnnnnnnnnnnnnnnnnnnnnnnnnnnnnnnnnnnnnnnnnnnnnnnnnnnnnnnnnnnnnnnnnnnnnnnnnnnnnnnnnnnnnnnnnnnnnnnnnnnnnnnnnnnnnnnnnnnnnnnnnnnnnnnnnnnnnnnnnnnnnnnnnnnnnnnnnnnnnnnnnnnnnnnnnnnnnnnnnnnnnnnnnnnnnnnnnnnnnnnnnnnnnnnnnnnnnnnnnnnnnnnnnnnnnnnnnnnnnnnnnnnnnnnnnnnnnnnnnnnnnnnnnnnnnnnnnnnnnnnnnnnnnnnnnnnnnnnnnnnnnnnnnnnnnnnnnnnnnnnnnnnnnnnnnnnnnnnnnnnnnnnnnnnnnnnnnnnnnnnnnnnnnnnnnnnnnnnnnnnnnnnnnnnnnnnnnnnnnnnnnnnnnnnnnnnnnnnnnnnnnnnnnnnnnnnnnnnnnnnnnnnnnnnnnnnnnnnnnnnnnnnnnnnnnnnnnnnnnnnnnnnnnnnnnnnnnnnnnnnnnnnnnnnnnnnnnnnnnnnnnnnnnnnnnnnnnnnnnnnnnnnnnnnnnnnnnnnnnnnnnnnnnnnnnnnnnnnnnnnnnnnnnnnnnnnnnnnnnnnnnnnnnnnnnnnnnnnnnnnnnnnnnnnnnnnnnnnnnnnnnnnnnnnnnnnnnnnnnnnnnnnnnnnnnnnnnnnnnnnnnnnnnnnnnnnnnnnnnnnnnnnnnnnnnnnnnnnnnnnnnnnnnnnnnnnnnnnnnnnnnnnnnnnnnnnnnnnnnnnnnnnnnnnnnnnnnnnnnnnnnnnnnnnnnnnnnnnnnnnnnnnnnnnnnnnnnnnnnnnnnnnnnnnnnnnnnnnnnnnnnnnnnnnnnnnnnnnnnnnnnnnnnnnnnnnnnnnnnnnnnnnnnnnnnnnnnnnnnnnnnnnnnnnnnnnnnnnnnnnnnnnnnnnnnnnnnnnnnnnnnnnnnnnnnnnnnnnnnnnnnnnnnnnnnnnnnnnnnnnnnnnnnnnnnnnnnnnnnnnnnnnnnnnnnnnnnnnnnnnnnnnnnnnnnnnnnnnnnnnnnnnnnnnnnnnnnnnnnnnnnnnnnnnnnnnnnnnnnnnnnnnnnnnnnnnnnnnnnnnnnnnnnnnnnnnnnnnnnnnnnnnnnnnnnnnnnnnnnnnnnnnnnnnnnnnnnnnnnnnnnnnnnnnnnnnnnnnnnnnnnnnnnnnnnnnnnnnnnnnnnnnnnnnnnnnnnnnnnnnnnnnnnnnnnnnnnnnnnnnnnnnnnnnnnnnnnnnnnnnnnnnnnnnnnnnnnnnnnnnnnnnnnnnnnnnnnnnnnnnnnnnnnnnnnnnnnnnnnnnnnnnnnnnnnnnnnnnnnnnnnnnnnnnnnnnnnnnnnnnnnnnnnnnnnnnnnnnnnnnnnnnnnnnnnnnnnnnnnnnnnnnnnnnnnnnnnnnnnnnnnnnnnnnnnnnnnnnnnnnnnnnnnnnnnnnnnnnnnnnnnnnnnnnnnnnnnnnnnnnnnnnnnnnnnnnnnnnnnnnnnnnnnnnnnnnnnnnnnnnnnnnnnnnnnnnnnnnnnnnnnnnnnnnnnnnnnnnnnnnnnnnnnnnnnnnnnnnnnnnnnnnnnnnnnnnnnnnnnnnnnnnnnnnnnnnnnnnnnnnnnnnnnnnnnnnnnnnnnnnnnnnnnnnnnnnnnnnnnnnnnnnnnnnnnnnnnnnnnnnnnnnnnnnnnnnnnnnnnnnnnnnnnnnnnnnnnnnnnnnnnnnnnnnnnnnnnnnnnnnnnnnnnnnnnnnnnnnnnnnnnnnnnnnnnnnnnnnnnnnnnnnnnnnnnnnnnnnnnnnnnnnnnnnnnnnnnnnnnnnnnnnnnnnnnnnnnnnnnnnnnnnnnnnnnnnnnnnnnnnnnnnnnnnnnnnnnnnnnnnnnnnnnnnnnnnnnnnnnnnnnnnnnnnnnnnnnnnnnnnnnnnnnnnnnnnnnnnnnnnnnnnnnnnnnnnnnnnnnnnnnnnnnnnnnnnnnnnnnnnnnnnnnnnnnnnnnnnnnnnnnnnnnnnnnnnnnnnnnnnnnnnnnnnnnnnnnnnnnnnnnnnnnnnnnnnnnnnnnnnnnnnnnnnnnnnnnnnnnnnnnnnnnnnnnnnnnnnnnnnnnnnnnnnnnnnnnnnnnnnnnnnnnnnnnnnnnnnnnnnnnnnnnnnnnnnnnnnnnnnnnnnnnnnnnnnnnnnnnnnnnnnnnnnnnnnnnnnnnnnnnnnnnnnnnnnnnnnnnnnnnnnnnnnnnnnnnnnnnnnnnnnnnnnnnnnnnnnnnnnnnnnnnnnnnnnnnnnnnnnnnnnnnnnnnnnnnnnnnnnnnnnnnnnnnnnnnnnnnnnnnnnnnnnnnnnnnnnnnnnnnnnnnnnnnnnnnnnnnnnnnnnnnnnnnnnnnnnnnnnnnnnnnnnnnnnnnnnnnnnnnnnnnnnnnnnnnnnnnnnnnnnnnnnnnnnnnnnnnnnnnnnnnnnnnnnnnnnnnnnnnnnnnnnnnnnnnnnnnnnnnnnnnnnnnnnnnnnnnnnnnnnnnnnnnnnnnnnnnnnnnnnnnnnnnnnnnnnnnnnnnnnnnnnnnnnnnnnnnnnnnnnnnnnnnnnnnnnnnnnnnnnnnnnnnnnnnnnnnnnnnnnnnnnnnnnnnnnnnnnnnnnnnnnnnnnnnnnnnnnnnnnnnnnnnnnnnnnnnnnnnnnnnnnnnnnnnnnnnnnnnnnnnnnnnnnnnnnnnnnnnnnnnnnnnnnnnnnnnnnnnnnnnnnnnnnnnnnnnnnnnnnnnnnnnnnnnnnnnnnnnnnnnnnnnnnnnnnnnnnnnnnnnnnnnnnnnnnnnnnnnnnnnnnnnnnnnnnnnnnnnnnnnnnnnnnnnnnnnnnnnnnnnnnnnnnnnnnnnnnnnnnnnnnnnnnnnnnnnnnnnnnnnnnnnnnnnnnnnnnnnnnnnnnnnnnnnnnnnnnnnnnnnnnnnnnnnnnnnnnnnnnnnnnnnnnnnnnnnnnnnnnnnnnnnnnnnnnnnnnnnnnnnnnnnnnnnnnnnnnnnnnnnnnnnnnnnnnnnnnnnnnnnnnnnnnnnnnnnnnnnnnnnnnnnnnnnnnnnnnnnnnnnnnnnnnnnnnnnnnnnnnnnnnnnnnnnnnnnnnnnnnnnnnnnnnnnnnnnnnnnnnnnnnnnnnnnnnnnnnnnnnnnnnnnnnnnnnnnnnnnnnnnnnnnnnnnnnnnnnnnnnnnnnnnnnnnnnnnnnnnnnnnnnnnnnnnnnnnnnnnnnnnnnnnnnnnnnnnnnnnnnnnnnnnnnnnnnnnnnnnnnnnnnnnnnnnnnnnnnnnnnnnnnnnnnnnnnnnnnnnnnnnnnnnnnnnnnnnnnnnnnnnnnnnnnnnnnnnnnnnnnnnnnnnnnnnnnnnnnnnnnnnnnnnnnnnnnnnnnnnnnnnnnnnnnnnnnnnnnnnnnnnnnnnnnnnnnnnnnnnnnnnnnnnnnnnnnnnnnnnnnnnnnnnnnnnnnnnnnnnnnnnnnnnnnnnnnnnnnnnnnnnnnnnnnnnnnnnnnnnnnnnnnnnnnnnnnnnnnnnnnnnnnnnnnnnnnnnnnnnnnnnnnnnnnnnnnnnnnnnnnnnnnnnnnnnnnnnnnnnnnnnnnnnnnnnnnnnnnnnnnnnnnnnnnnnnnnnnnnnnnnnnnnnnnnnnnnnnnnnnnnnnnnnnnnnnnnnnnnnnnnnnnnnnnnnnnnnnnnnnnnnnnnnnnnnnnnnnnnnnnnnnnnnnnnnnnnnnnnnnnnnnnnnnnnnnnnnnnnnnnnnnnnnnnnnnnnnnnnnnnnnnnnnnnnnnnnnnnnnnnnnnnnnnnnnnnnnnnnnnnnnnnnnnnnnnnnnnnnnnnnnnnnnnnnnnnnnnnnnnnnnnnnnnnnnnnnnnnnnnnnnnnnnnnnnnnnnnnnnnnnnnnnnnnnnnnnnnnnnnnnnnnnnnnnnnnnnnnnnnnnnnnnnnnnnnnnnnnnnnnnnnnnnnnnnnnnnnnnnnnnnnnnnnnnnnnnnnnnnnnnnnnnnnnnnnnnnnnnnnnnnnnnnnnnnnnnnnnnnnnnnnnnnnnnnnnnnnnnnnnnnnnnnnnnnnnnnnnnnnnnnnnnnnnnnnnnnnnnnnnnnnnnnnnnnnnnnnnnnnnnnnnnnnnnnnnnnnnnnnnnnnnnnnnnnnnnnnnnnnnnnnnnnnnnnnnnnnnnnnnnnnnnnnnnnnnnnnnnnnnnnnnnnnnnnnnnnnnnnnnnnnnnnnnnnnnnnnnnnnnnnnnnnnnnnnnnnnnnnnnnnnnnnnnnnnnnnnnnnnnnnnnnnnnnnnnnnnnnnnnnnnnnnnnnnnnnnnnnnnnnnnnnnnnnnnnnnnnnnnnnnnnnnnnnnnnnnnnnnnnnnnnnnnnnnnnnnnnnnnnnnnnnnnnnnnnnnnnnnnnnnnnnnnnnnnnnnnnnnnnnnnnnnnnnnnnnnnnnnnnnnnnnnnnnnnnnnnnnnnnnnnnnnnnnnnnnnnnnnnnnnnnnnnnnnnnnnnnnnnnnnnnnnnnnnnnnnnnnnnnnnnnnnnnnnnnnnnnnnnnnnnnnnnnnnnnnnnnnnnnnnnnnnnnnnnnnnnnnnnnnnnnnnnnnnnnnnnnnnnnnnnnnnnnnnnnnnnnnnnnnnnnnnnnnnnnnnnnnnnnnnnnnnnnnnnnnnnnnnnnnnnnnnnnnnnnnnnnnnnnnnnnnnnnnnnnnnnnnnnnnnnnnnnnnnnnnnnnnnnnnnnnnnnnnnnnnnnnnnnnnnnnnnnnnnnnnnnnnnnnnnnnnnnnnnnnnnnnnnnnnnnnnnnnnnnnnnnnnnnnnnnnnnnnnnnnnnnnnnnnnnnnnnnnnnnnnnnnnnnnnnnnnnnnnnnnnnnnnnnnnnnnnnnnnnnnnnnnnnnnnnnnnnnnnnnnnnnnnnnnnnnnnnnnnnnnnnnnnnnnnnnnnnnnnnnnnnnnnnnnnnnnnnnnnnnnnnnnnnnnnnnnnnnnnnnnnnnnnnnnnnnnnnnnnnnnnnnnnnnnnnnnnnnnnnnnnnnnnnnnnnnnnnnnnnnnnnnnnnnnnnnnnnnnnnnnnnnnnnnnnnnnnnnnnnnnnnnnnnnnnnnnnnnnnnnnnnnnnnnnnnnnnnnnnnnnnnnnnnnnnnnnnnnnnnnnnnnnnnnnnnnnnnnnnnnnnnnnnnnnnnnnnnnnnnnnnnnnnnnnnnnnnnnnnnnnnnnnnnnnnnnnnnnnnnnnnnnnnnnnnnnnnnnnnnnnnnnnnnnnnnnnnnnnnnnnnnnnnnnnnnnnnnnnnnnnnnnnnnnnnnnnnnnnnnnnnnnnnnnnnnnnnnnnnnnnnnnnnnnnnnnnnnnnnnnnnnnnnnnnnnnnnnnnnnnnnnnnnnnnnnnnnnnnnnnnnnnnnnnnnnnnnnnnnnnnnnnnnnnnnnnnnnnnnnnnnnnnnnnnnnnnnnnnnnnnnnnnnnnnnnnnnnnnnnnnnnnnnnnnnnnnnnnnnnnnnnnnnnnnnnnnnnnnnnnnnnnnnnnnnnnnnnnnnnnnnnnnnnnnnnnnnnnnnnnnnnnnnnnnnnnnnnnnnnnnnnnnnnnnnnnnnnnnnnnnnnnnnnnnnnnnnnnnnnnnnnnnnnnnnnnnnnnnnnnnnnnnnnnnnnnnnnnnnnnnnnnnnnnnnnnnnnnnnnnnnnnnnnnnnnnnnnnnnnnnnnnnnnnnnnnnnnnnnnnnnnnnnnnnnnnnnnnnnnnnnnnnnnnnnnnnnnnnnnnnnnnnnnnnnnnnnnnnnnnnnnnnnnnnnnnnnnnnnnnnnnnnnnnnnnnnnnnnnnnnnnnnnnnnnnnnnnnnnnnnnnnnnnnnnnnnnnnnnnnnnnnnnnnnnnnnnnnnnnnnnnnnnnnnnnnnnnnnnnnnnnnnnnnnnnnnnnnnnnnnnnnnnnnnnnnnnnnnnnnnnnnnnnnnnnnnnnnnnnnnnnnnnnnnnnnnnnnnnnnnnnnnnnnnnnnnnnnnnnnnnnnnnnnnnnnnnnnnnnnnnnnnnnnnnnnnnnnnnnnnnnnnnnnnnnnnnnnnnnnnnnnnnnnnnnnnnnnnnnnnnnnnnnnnnnnnnnnnnnnnnnnnnnnnnnnnnnnnnnnnnnnnnnnnnnnnnnnnnnnnnnnnnnnnnnnnnnnnnnnnnnnnnnnnnnnnnnnnnnnnnnnnnnnnnnnnnnnnnnnnnnnnnnnnnnnnnnnnnnnnnnnnnnnnnnnnnnnnnnnnnnnnnnnnnnnnnnnnnnnnnnnnnnnnnnnnnnnnnnnnnnnnnnnnnnnnnnnnnnnnnnnnnnnnnnnnnnnnnnnnnnnnnnnnnnnnnnnnnnnnnnnnnnnnnnnnnnnnnnnnnnnnnnnnnnnnnnnnnnnnnnnnnnnnnnnnnnnnnnnnnnnnnnnnnnnnnnnnnnnnnnnnnnnnnnnnnnnnnnnnnnnnnnnnnnnnnnnnnnnnnnnnnnnnnnnnnnnnnnnnnnnnnnnnnnnnnnnnnnnnnnnnnnnnnnnnnnnnnnnnnnnnnnnnnnnnnnnnnnnnnnnnnnnnnnnnnnnnnnnnnnnnnnnnnnnnnnnnnnnnnnnnnnnnnnnnnnnnnnnnnnnnnnnnnnnnnnnnnnnnnnnnnnnnnnnnnnnnnnnnnnnnnnnnnnnnnnnnnnnnnnnnnnnnnnnnnnnnnnnnnnnnnnnnnnnnnnnnnnnnnnnnnnnnnnnnnnnnnnnnnnnnnnnnnnnnnnnnnnnnnnnnnnnnnnnnnnnnnnnnnnnnnnnnnnnnnnnnnnnnnnnnnnnnnnnnnnnnnnnnnnnnnnnnnnnnnnnnnnnnnnnnnnnnnnnnnnnnnnnnnnnnnnnnnnnnnnnnnnnnnnnnnnnnnnnnnnnnnnnnnnnnnnnnnnnnnnnnnnnnnnnnnnnnnnnnnnnnnnnnnnnnnnnnnnnnnnnnnnnnnnnnnnnnnnnnnnnnnnnnnnnnnnnnnnnnnnnnnnnnnnnnnnnnnnnnnnnnnnnnnnnnnnnnnnnnnnnnnnnnnnnnnnnnnnnnnnnnnnnnnnnnnnnnnnnnnnnnnnnnnnnnnnnnnnnnnnnnnnnnnnnnnnnnnnnnnnnnnnnnnnnnnnnnnnnnnnnnnnnnnnnnnnnnnnnnnnnnnnnnnnnnnnnnnnnnnnnnnnnnnnnnnnnnnnnnnnnnnnnnnnnnnnnnnnnnnnnnnnnnnnnnnnnnnnnnnnnnnnnnnnnnnnnnnnnnnnnnnnnnnnnnnnnnnnnnnnnnnnnnnnnnnnnnnnnnnnnnnnnnnnnnnnnnnnnnnnnnnnnnnnnnnnnnnnnnnnnnnnnnnnnnnnnnnnnnnnnnnnnnnnnnnnnnnnnnnnnnnnnnnnnnnnnnnnnnnnnnnnnnnnnnnnnnnnnnnnnnnnnnnnnnnnnnnnnnnnnnnnnnnnnnnnnnnnnnnnnnnnnnnnnnnnnnnnnnnnnnnnnnnnnnnnnnnnnnnnnnnnnnnnnnnnnnnnnnnnnnnnnnnnnnnnnnnnnnnnnnnnnnnnnnnnnnnnnnnnnnnnnnnnnnnnnnnnnnnnnnnnnnnnnnnnnnnnnnnnnnnnnnnnnnnnnnnnnnnnnnnnnnnnnnnnnnnnnnnnnnnnnnnnnnnnnnnnnnnnnnnnnnnnnnnnnnnnnnnnnnnnnnnnnnnnnnnnnnnnnnnnnnnnnnnnnnnnnnnnnnnnnnnnnnnnnnnnnnnnnnnnnnnnnnnnnnnnnnnnnnnnnnnnnnnnnnnnnnnnnnnnnnnnnnnnnnnnnnnnnnnnnnnnnnnnnnnnnnnnnnnnnnnnnnnnnnnnnnnnnnnnnnnnnnnnnnnnnnnnnnnnnnnnnnnnnnnnnnnnnnnnnnnnnnnnnnnnnnnnnnnnnnnnnnnnnnnnnnnnnnnnnnnnnnnnnnnnnnnnnnnnnnnnnnnnnnnnnnnnnnnnnnnnnnnnnnnnnnnnnnnnnnnnnnnnnnnnnnnnnnnnnnnnnnnnnnnnnnnnnnnnnnnnnnnnnnnnnnnnnnnnnnnnnnnnnnnnnnnnnnnnnnnnnnnnnnnnnnnnnnnnnnnnnnnnnnnnnnnnnnnnnnnnnnnnnnnnnnnnnnnnnnnnnnnnnnnnnnnnnnnnnnnnnnnnnnnnnnnnnnnnnnnnnnnnnnnnnnnnnnnnnnnnnnnnnnnnnnnnnnnnnnnnnnnnnnnnnnnnnnnnnnnnnnnnnnnnnnnnnnnnnnnnnnnnnnnnnnnnnnnnnnnnnnnnnnnnnnnnnnnnnnnnnnnnnnnnnnnnnnnnnnnnnnnnnnnnnnnnnnnnnnnnnnnnnnnnnnnnnnnnnnnnnnnnnnnnnnnnnnnnnnnnnnnnnnnnnnnnnnnnnnnnnnnnnnnnnnnnnnnnnnnnnnnnnnnnnnnnnnnnnnnnnnnnnnnnnnnnnnnnnnnnnnnnnnnnnnnnnnnnnnnnnnnnnnnnnnnnnnnnnnnnnnnnnnnnnnnnnnnnnnnnnnnnnnnnnnnnnnnnnnnnnnnnnnnnnnnnnnnnnnnnnnnnnnnnnnnnnnnnnnnnnnnnnnnnnnnnnnnnnnnnnnnnnnnnnnnnnnnnnnnnnnnnnnnnnnnnnnnnnnnnnnnnnnnnnnnnnnnnnnnnnnnnnnnnnnnnnnnnnnnnnnnnnnnnnnnnnnnnnnnnnnnnnnnnnnnnnnnnnnnnnnnnnnnnnnnnnnnnnnnnnnnnnnnnnnnnnnnnnnnnnnnnnnnnnnnnnnnnnnnnnnnnnnnnnnnnnnnnnnnnnnnnnnnnnnnnnnnnnnnnnnnnnnnnnnnnnnnnnnnnnnnnnnnnnnnnnnnnnnnnnnnnnnnnnnnnnnnnnnnnnnnnnnnnnnnnnnnnnnnnnnnnnnnnnnnnnnnnnnnnnnnnnnnnnnnnnnnnnnnnnnnnnnnnnnnnnnnnnnnnnnnnnnnnnnnnnnnnnnnnnnnnnnnnnnnnnnnnnnnnnnnnnnnnnnnnnnnnnnnnnnnnnnnnnnnnnnnnnnnnnnnnnnnnnnnnnnnnnnnnnnnnnnnnnnnnnnnnnnnnnnnnnnnnnnnnnnnnnnnnnnnnnnnnnnnnnnnnnnnnnnnnnnnnnnnnnnnnnnnnnnnnnnnnnnnnnnnnnnnnnnnnnnnnnnnnnnnnnnnnnnnnnnnnnnnnnnnnnnnnnnnnnnnnnnnnnnnnnnnnnnnnnnnnnnnnnnnnnnnnnnnnnnnnnnnnnnnnnnnnnnnnnnnnnnnnnnnnnnnnnnnnnnnnnnnnnnnnnnnnnnnnnnnnnnnnnnnnnnnnnnnnnnnnnnnnnnnnnnnnnnnnnnnnnnnnnnnnnnnnnnnnnnnnnnnnnnnnnnnnnnnnnnnnnnnnnnnnnnnnnnnnnnnnnnnnnnnnnnnnnnnnnnnnnnnnnnnnnnnnnnnnnnnnnnnnnnnnnnnnnnnnnnnnnnnnnnnnnnnnnnnnnnnnnnnnnnnnnnnnnnnnnnnnnnnnnnnnnnnnnnnnnnnnnnnnnnnnnnnnnnnnnnnnnnnnnnnnnnnnnnnnnnnnnnnnnnnnnnnnnnnnnnnnnnnnnnnnnnnnnnnnnnnnnnnnnnnnnnnnnnnnnnnnnnnnnnnnnnnnnnnnnnnnnnnnnnnnnnnnnnnnnnnnnnnnnnnnnnnnnnnnnnnnnnnnnnnnnnnnnnnnnnnnnnnnnnnnnnnnnnnnnnnnnnnnnnnnnnnnnnnnnnnnnnnnnnnnnnnnnnnnnnnnnnnnnnnnnnnnnnnnnnnnnnnnnnnnnnnnnnnnnnnnnnnnnnnnnnnnnnnnnnnnnnnnnnnnnnnnnnnnnnnnnnnnnnnnnnnnnnnnnnnnnnnnnnnnnnnnnnnnnnnnnnnnnnnnnnnnnnnnnnnnnnnnnnnnnnnnnnnnnnnnnnnnnnnnnnnnnnnnnnnnnnnnnnnnnnnnnnnnnnnnnnnnnnnnnnnnnnnnnnnnnnnnnnnnnnnnnnnnnnnnnnnnnnnnnnnnnnnnnnnnnnnnnnnnnnnnnnnnnnnnnnnnnnnnnnnnnnnnnnnnnnnnnnnnnnnnnnnnnnnnnnnnnnnnnnnnnnnnnnnnnnnnnnnnnnnnnnnnnnnnnnnnnnnnnnnnnnnnnnnnnnnnnnnnnnnnnnnnnnnnnnnnnnnnnnnnnnnnnnnnnnnnnnnnnnnnnnnnnnnnnnnnnnnnnnnnnnnnnnnnnnnnnnnnnnnnnnnnnnnnnnnnnnnnnnnnnnnnnnnnnnnnnnnnnnnnnnnnnnnnnnnnnnnnnnnnnnnnnnnnnnnnnnnnnnnnnnnnnnnnnnnnnnnnnnnnnnnnnnnnnnnnnnnnnnnnnnnnnnnnnnnnnnnnnnnnnnnnnnnnnnnnnnnnnnnnnnnnnnnnnnnnnnnnnnnnnnnnnnnnnnnnnnnnnnnnnnnnnnnnnnnnnnnnnnnnnnnnnnnnnnnnnnnnnnnnnnnnnnnnnnnnnnnnnnnnnnnnnnnnnnnnnnnnnnnnnnnnnnnnnnnnnnnnnnnnnnnnnnnnnnnnnnnnnnnnnnnnnnnnnnnnnnnnnnnnnnnnnnnnnnnnnnnnnnnnnnnnnnnnnnnnnnnnnnnnnnnnnnnnnnnnnnnnnnnnnnnnnnnnnnnnnnnnnnnnnnnnnnnnnnnnnnnnnnnnnnnnnnnnnnnnnnnnnnnnnnnnnnnnnnnnnnnnnnnnnnnnnnnnnnnnnnnnnnnnnnnnnnnnnnnnnnnnnnnnnnnnnnnnnnnnnnnnnnnnnnnnnnnnnnnnnnnnnnnnnnnnnnnnnnnnnnnnnnnnnnnnnnnnnnnnnnnnnnnnnnnnnnnnnnnnnnnnnnnnnnnnnnnnnnnnnnnnnnnnnnnnnnnnnnnnnnnnnnnnnnnnnnnnnnnnnnnnnnnnnnnnnnnnnnnnnnnnnnnnnnnnnnnnnnnnnnnnnnnnnnnnnnnnnnnnnnnnnnnnnnnnnnnnnnnnnnnnnnnnnnnnnnnnnnnnnnnnnnnnnnnnnnnnnnnnnnnnnnnnnnnnnnnnnnnnnnnnnnnnnnnnnnnnnnnnnnnnnnnnnnnnnnnnnnnnnnnnnnnnnnnnnnnnnnnnnnnnnnnnnnnnnnnnnnnnnnnnnnnnnnnnnnnnnnnnnnnnnnnnnnnnnnnnnnnnnnnnnnnnnnnnnnnnnnnnnnnnnnnnnnnnnnnnnnnnnnnnnnnnnnnnnnnnnnnnnnnnnnnnnnnnnnnnnnnnnnnnnnnnnnnnnnnnnnnnnnnnnnnnnnnnnnnnnnnnnnnnnnnnnnnnnnnnnnnnnnnnnnnnnnnnnnnnnnnnnnnnnnnnnnnnnnnnnnnnnnnnnnnnnnnnnnnnnnnnnnnnnnnnnnnnnnnnnnnnnnnnnnnnnnnnnnnnnnnnnnnnnnnnnnnnnnnnnnnnnnnnnnnnnnnnnnnnnnnnnnnnnnnnnnnnnnnnnnnnnnnnnnnnnnnnnnnnnnnnnnnnnnnnnnnnnnnnnnnnnnnnnnnnnnnnnnnnnnnnnnnnnnnnnnnnnnnnnnnnnnnnnnnnnnnnnnnnnnnnnnnnnnnnnnnnnnnnnnnnnnnnnnnnnnnnnnnnnnnnnnnnnnnnnnnnnnnnnnnnnnnnnnnnnnnnnnnnnnnnnnnnnnnnnnnnnnnnnnnnnnnnnnnnnnnnnnnnnnnnnnnnnnnnnnnnnnnnnnnnnnnnnnnnnnnnnnnnnnnnnnnnnnnnnnnnnnnnnnnnnnnnnnnnnnnnnnnnnnnnnnnnnnnnnnnnnnnnnnnnnnnnnnnnnnnnnnnnnnnnnnnnnnnnnnnnnnnnnnnnnnnnnnnnnnnnnnnnnnnnnnnnnnnnnnnnnnnnnnnnnnnnnnnnnnnnnnnnnnnnnnnnnnnnnnnnnnnnnnnnnnnnnnnnnnnnnnnnnnnnnnnnnnnnnnnnnnnnnnnnnnnnnnnnnnnnnnnnnnnnnnnnnnnnnnnnnnnnnnnnnnnnnnnnnnnnnnnnnnnnnnnnnnnnnnnnnnnnnnnnnnnnnnnnnnnnnnnnnnnnnnnnnnnnnnnnnnnnnnnnnnnnnnnnnnnnnnnnnnnnnnnnnnnnnnnnnnnnnnnnnnnnnnnnnnnnnnnnnnnnnnnnnnnnnnnnnnnnnnnnnnnnnnnnnnnnnnnnnnnnnnnnnnnnnnnnnnnnnnnnnnnnnnnnnnnnnnnnnnnnnnnnnnnnnnnnnnnnnnnnnnnnnnnnnnnnnnnnnnnnnnnnnnnnnnnnnnnnnnnnnnnnnnnnnnnnnnnnnnnnnnnnnnnnnnnnnnnnnnnnnnnnnnnnnnnnnnnnnnnnnnnnnnnnnnnnnnnnnnnnnnnnnnnnnnnnnnnnnnnnnnnnnnnnnnnnnnnnnnnnnnnnnnnnnnnnnnnnnnnnnnnnnnnnnnnnnnnnnnnnnnnnnnnnnnnnnnnnnnnnnnnnnnnnnnnnnnnnnnnnnnnnnnnnnnnnnnnnnnnnnnnnnnnnnnnnnnnnnnnnnnnnnnnnnnnnnnnnnnnnnnnnnnnnnnnnnnnnnnnnnnnnnnnnnnnnnnnnnnnnnnnnnnnnnnnnnnnnnnnnnnnnnnnnnnnnnnnnnnnnnnnnnnnnnnnnnnnnnnnnnnnnnnnnnnnnnnnnnnnnnnnnnnnnnnnnnnnnnnnnnnnnnnnnnnnnnnnnnnnnnnnnnnnnnnnnnnnnnnnnnnnnnnnnnnnnnnnnnnnnnnnnnnnnnnnnnnnnnnnnnnnnnnnnnnnnnnnnnnnnnnnnnnnnnnnnnnnnnnnnnnnnnnnnnnnnnnnnnnnnnnnnnnnnnnnnnnnnnnnnnnnnnnnnnnnnnnnnnnnnnnnnnnnnnnnnnnnnnnnnnnnnnnnnnnnnnnnnnnnnnnnnnnnnnnnnnnnnnnnnnnnnnnnnnnnnnnnnnnnnnnnnnnnnnnnnnnnnnnnnnnnnnnnnnnnnnnnnnnnnnnnnnnnnnnnnnnnnnnnnnnnnnnnnnnnnnnnnnnnnnnnnnnnnnnnnnnnnnnnnnnnnnnnnnnnnnnnnnnnnnnnnnnnnnnnnnnnnnnnnnnnnnnnnnnnnnnnnnnnnnnnnnnnnnnnnnnnnnnnnnnnnnnnnnnnnnnnnnnnnnnnnnnnnnnnnnnnnnnnnnnnnnnnnnnnnnnnnnnnnnnnnnnnnnnnnnnnnnnnnnnnnnnnnnnnnnnnnnnnnnnnnnnnnnnnnnnnnnnnnnnnnnnnnnnnnnnnnnnnnnnnnnnnnnnnnnnnnnnnnnnnnnnnnnnnnnnnnnnnnnnnnnnnnnnnnnnnnnnnnnnnnnnnnnnnnnnnnnnnnnnnnnnnnnnnnnnnnnnnnnnnnnnnnnnnnnnnnnnnnnnnnnnnnnnnnnnnnnnnnnnnnnnnnnnnnnnnnnnnnnnnnnnnnnnnnnnnnnnnnnnnnnnnnnnnnnnnnnnnnnnnnnnnnnnnnnnnnnnnnnnnnnnnnnnnnnnnnnnnnnnnnnnnnnnnnnnnnnnnnnnnnnnnnnnnnnnnnnnnnnnnnnnnnnnnnnnnnnnnnnnnnnnnnnnnnnnnnnnnnnnnnnnnnnnnnnnnnnnnnnnnnnnnnnnnnnnnnnnnnnnnnnnnnnnnnnnnnnnnnnnnnnnnnnnnnnnnnnnnnnnnnnnnnnnnnnnnnnnnnnnnnnnnnnnnnnnnnnnnnnnnnnnnnnnnnnnnnnnnnnnnnnnnnnnnnnnnnnnnnnnnnnnnnnnnnnnnnnnnnnnnnnnnnnnnnnnnnnnnnnnnnnnnnnnnnnnnnnnnnnnnnnnnnnnnnnnnnnnnnnnnnnnnnnnnnnnnnnnnnnnnnnnnnnnnnnnnnnnnnnnnnnnnnnnnnnnnnnnnnnnnnnnnnnnnnnnnnnnnnnnnnnnnnnnnnnnnnnnnnnnnnnnnnnnnnnnnnnnnnnnnnnnnnnnnnnnnnnnnnnnnnnnnnnnnnnnnnnnnnnnnnnnnnnnnnnnnnnnnnnnnnnnnnnnnnnnnnnnnnnnnnnnnnnnnnnnnnnnnnnnnnnnnnnnnnnnnnnnnnnnnnnnnnnnnnnnnnnnnnnnnnnnnnnnnnnnnnnnnnnnnnnnnnnnnnnnnnnnnnnnnnnnnnnnnnnnnnnnnnnnnnnnnnnnnnnnnnnnnnnnnnnnnnnnnnnnnnnnnnnnnnnnnnnnnnnnnnnnnnnnnnnnnnnnnnnnnnnnnnnnnnnnnnnnnnnnnnnnnnnnnnnnnnnnnnnnnnnnnnnnnnnnnnnnnnnnnnnnnnnnnnnnnnnnnnnnnnnnnnnnnnnnnnnnnnnnnnnnnnnnnnnnnnnnnnnnnnnnnnnnnnnnnnnnnnnnnnnnnnnnnnnnnnnnnnnnnnnnnnnnnnnnnnnnnnnnnnnnnnnnnnnnnnnnnnnnnnnnnnnnnnnnnnnnnnnnnnnnnnnnnnnnnnnnnnnnnnnnnnnnnnnnnnnnnnnnnnnnnnnnnnnnnnnnnnnnnnnnnnnnnnnnnnnnnnnnnnnnnnnnnnnnnnnnnnnnnnnnnnnnnnnnnnnnnnnnnnnnnnnnnnnnnnnnnnnnnnnnnnnnnnnnnnnnnnnnnnnnnnnnnnnnnnnnnnnnnnnnnnnnnnnnnnnnnnnnnnnnnnnnnnnnnnnnnnnnnnnnnnnnnnnnnnnnnnnnnnnnnnnnnnnnnnnnnnnnnnnnnnnnnnnnnnnnnnnnnnnnnnnnnnnnnnnnnnnnnnnnnnnnnnnnnnnnnnnnnnnnnnnnnnnnnnnnnnnnnnnnnnnnnnnnnnnnnnnnnnnnnnnnnnnnnnnnnnnnnnnnnnnnnnnnnnnnnnnnnnnnnnnnnnnnnnnnnnnnnnnnnnnnnnnnnnnnnnnnnnnnnnnnnnnnnnnnnnnnnnnnnnnnnnnnnnnnnnnnnnnnnnnnnnnnnnnnnnnnnnnnnnnnnnnnnnnnnnnnnnnnnnnnnnnnnnnnnnnnnnnnnnnnnnnnnnnnnnnnnnnnnnnnnnnnnnnnnnnnnnnnnnnnnnnnnnnnnnnnnnnnnnnnnnnnnnnnnnnnnnnnnnnnnnnnnnnnnnnnnnnnnnnnnnnnnnnnnnnnnnnnnnnnnnnnnnnnnnnnnnnnnnnnnnnnnnnnnnnnnnnnnnnnnnnnnnnnnnnnnnnnnnnnnnnnnnnnnnnnnnnnnnnnnnnnnnnnnnnnnnnnnnnnnnnnnnnnnnnnnnnnnnnnnnnnnnnnnnnnnnnnnnnnnnnnnnnnnnnnnnnnnnnnnnnnnnnnnnnnnnnnnnnnnnnnnnnnnnnnnnnnnnnnnnnnnnnnnnnnnnnnnnnnnnnnnnnnnnnnnnnnnnnnnnnnnnnnnnnnnnnnnnnnnnnnnnnnnnnnnnnnnnnnnnnnnnnnnnnnnnnnnnnnnnnnnnnnnnnnnnnnnnnnnnnnnnnnnnnnnnnnnnnnnnnnnnnnnnnnnnnnnnnnnnnnnnnnnnnnnnnnnnnnnnnnnnnnnnnnnnnnnnnnnnnnnnnnnnnnnnnnnnnnnnnnnnnnnnnnnnnnnnnnnnnnnnnnnnnnnnnnnnnnnnnnnnnnnnnnnnnnnnnnnnnnnnnnnnnnnnnnnnnnnnnnnnnnnnnnnnnnnnnnnnnnnnnnnnnnnnnnnnnnnnnnnnnnnnnnnnnnnnnnnnnnnnnnnnnnnnnnnnnnnnnnnnnnnnnnnnnnnnnnnnnnnnnnnnnnnnnnnnnnnnnnnnnnnnnnnnnnnnnnnnnnnnnnnnnnnnnnnnnnnnnnnnnnnnnnnnnnnnnnnnnnnnnnnnnnnnnnnnnnnnnnnnnnnnnnnnnnnnnnnnnnnnnnnnnnnnnnnnnnnnnnnnnnnnnnnnnnnnnnnnnnnnnnnnnnnnnnnnnnnnnnnnnnnnnnnnnnnnnnnnnnnnnnnnnnnnnnnnnnnnnnnnnnnnnnnnnnnnnnnnnnnnnnnnnnnnnnnnnnnnnnnnnnnnnnnnnnnnnnnnnnnnnnnnnnnnnnnnnnnnnnnnnnnnnnnnnnnnnnnnnnnnnnnnnnnnnnnnnnnnnnnnnnnnnnnnnnnnnnnnnnnnnnnnnnnnnnnnnnnnnnnnnnnnnnnnnnnnnnnnnnnnnnnnnnnnnnnnnnnnnnnnnnnnnnnnnnnnnnnnnnnnnnnnnnnnnnnnnnnnnnnnnnnnnnnnnnnnnnnnnnnnnnnnnnnnnnnnnnnnnnnnnnnnnnnnnnnnnnnnnnnnnnnnnnnnnnnnnnnnnnnnnnnnnnnnnnnnnnnnnnnnnnnnnnnnnnnnnnnnnnnnnnnnnnnnnnnnnnnnnnnnnnnnnnnnnnnnnnnnnnnnnnnnnnnnnnnnnnnnnnnnnnnnnnnnnnnnnnnnnnnnnnnnnnnnnnnnnnnnnnnnnnnnnnnnnnnnnnnnnnnnnnnnnnnnnnnnnnnnnnnnnnnnnnnnnnnnnnnnnnnnnnnnnnnnnnnnnnnnnnnnnnnnnnnnnnnnnnnnnnnnnnnnnnnnnnnnnnnnnnnnnnnnnnnnnnnnnnnnnnnnnnnnnnnnnnnnnnnnnnnnnnnnnnnnnnnnnnnnnnnnnnnnnnnnnnnnnnnnnnnnnnnnnnnnnnnnnnnnnnnnnnnnnnnnnnnnnnnnnnnnnnnnnnnnnnnnnnnnnnnnnnnnnnnnnnnnnnnnnnnnnnnnnnnnnnnnnnnnnnnnnnnnnnnnnnnnnnnnnnnnnnnnnnnnnnnnnnnnnnnnnnnnnnnnnnnnnnnnnnnnnnnnnnnnnnnnnnnnnnnnnnnnnnnnnnnnnnnnnnnnnnnnnnnnnnnnnnnnnnnnnnnnnnnnnnnnnnnnnnnnnnnnnnnnnnnnnnnnnnnnnnnnnnnnnnnnnnnnnnnnnnnnnnnnnnnnnnnnnnnnnnnnnnnnnnnnnnnnnnnnnnnnnnnnnnnnnnnnnnnnnnnnnnnnnnnnnnnnnnnnnnnnnnnnnnnnnnnnnnnnnnnnnnnnnnnnnnnnnnnnnnnnnnnnnnnnnnnnnnnnnnnnnnnnnnnnnnnnnnnnnnnnnnnnnnnnnnnnnnnnnnnnnnnnnnnnnnnnnnnnnnnnnnnnnnnnnnnnnnnnnnnnnnnnnnnnnnnnnnnnnnnnnnnnnnnnnnnnnnnnnnnnnnnnnnnnnnnnnnnnnnnnnnnnnnnnnnnnnnnnnnnnnnnnnnnnnnnnnnnnnnnnnnnnnnnnnnnnnnnnnnnnnnnnnnnnnnnnnnnnnnnnnnnnnnnnnnnnnnnnnnnnnnnnnnnnnnnnnnnnnnnnnnnnnnnnnnnnnnnnnnnnnnnnnnnnnnnnnnnnnnnnnnnnnnnnnnnnnnnnnnnnnnnnnnnnnnnnnnnnnnnnnnnnnnnnnnnnnnnnnnnnnnnnnnnnnnnnnnnnnnnnnnnnnnnnnnnnnnnnnnnnnnnnnnnnnnnnnnnnnnnnnnnnnnnnnnnnnnnnnnnnnnnnnnnnnnnnnnnnnnnnnnnnnnnnnnnnnnnnnnnnnnnnnnnnnnnnnnnnnnnnnnnnnnnnnnnnnnnnnnnnnnnnnnnnnnnnnnnnnnnnnnnnnnnnnnnnnnnnnnnnnnnnnnnnnnnnnnnnnnnnnnnnnnnnnnnnnnnnnnnnnnnnnnnnnnnnnnnnnnnnnnnnnnnnnnnnnnnnnnnnnnnnnnnnnnnnnnnnnnnnnnnnnnnnnnnnnnnnnnnnnnnnnnnnnnnnnnnnnnnnnnnnnnnnnnnnnnnnnnnnnnnnnnnnnnnnnnnnnnnnnnnnnnnnnnnnnnnnnnnnnnnnnnnnnnnnnnnnnnnnnnnnnnnnnnnnnnnnnnnnnnnnnnnnnnnnnnnnnnnnnnnnnnnnnnnnnnnnnnnnnnnnnnnnnnnnnnnnnnnnnnnnnnnnnnnnnnnnnnnnnnnnnnnnnnnnnnnnnnnnnnnnnnnnnnnnnnnnnnnnnnnnnnnnnnnnnnnnnnnnnnnnnnnnnnnnnnnnnnnnnnnnnnnnnnnnnnnnnnnnnnnnnnnnnnnnnnnnnnnnnnnnnnnnnnnnnnnnnnnnnnnnnnnnnnnnnnnnnnnnnnnnnnnnnnnnnnnnnnnnnnnnnnnnnnnnnnnnnnnnnnnnnnnnnnnnnnnnnnnnnnnnnnnnnnnnnnnnnnnnnnnnnnnnnnnnnnnnnnnnnnnnnnnnnnnnnnnnnnnnnnnnnnnnnnnnnnnnnnnnnnnnnnnnnnnnnnnnnnnnnnnnnnnnnnnnnnnnnnnnnnnnnnnnnnnnnnnnnnnnnnnnnnnnnnnnnnnnnnnnnnnnnnnnnnnnnnnnnnnnnnnnnnnnnnnnnnnnnnnnnnnnnnnnnnnnnnnnnnnnnnnnnnnnnnnnnnnnnnnnnnnnnnnnnnnnnnnnnnnnnnnnnnnnnnnnnnnnnnnnnnnnnnnnnnnnnnnnnnnnnnnnnnnnnnnnnnnnnnnnnnnnnnnnnnnnnnnnnnnnnnnnnnnnnnnnnnnnnnnnnnnnnnnnnnnnnnnnnnnnnnnnnnnnnnnnnnnnnnnnnnnnnnnnnnnnnnnnnnnnnnnnnnnnnnnnnnnnnnnnnnnnnnnnnnnnnnnnnnnnnnnnnnnnnnnnnnnnnnnnnnnnnnnnnnnnnnnnnnnnnnnnnnnnnnnnnnnnnnnnnnnnnnnnnnnnnnnnnnnnnnnnnnnnnnnnnnnnnnnnnnnnnnnnnnnnnnnnnnnnnnnnnnnnnnnnnnnnnnnnnnnnnnnnnnnnnnnnnnnnnnnnnnnnnnnnnnnnnnnnnnnnnnnnnnnnnnnnnnnnnnnnnnnnnnnnnnnnnnnnnnnnnnnnnnnnnnnnnnnnnnnnnnnnnnnnnnnnnnnnnnnnnnnnnnnnnnnnnnnnnnnnnnnnnnnnnnnnnnnnnnnnnnnnnnnnnnnnnnnnnnnnnnnnnnnnnnnnnnnnnnnnnnnnnnnnnnnnnnnnnnnnnnnnnnnnnnnnnnnnnnnnnnnnnnnnnnnnnnnnnnnnnnnnnnnnnnnnnnnnnnnnnnnnnnnnnnnnnnnnnnnnnnnnnnnnnnnnnnnnnnnnnnnnnnnnnnnnnnnnnnnnnnnnnnnnnnnnnnnnnnnnnnnnnnnnnnnnnnnnnnnnnnnnnnnnnnnnnnnnnnnnnnnnnnnnnnnnnnnnnnnnnnnnnnnnnnnnnnnnnnnnnnnnnnnnnnnnnnnnnnnnnnnnnnnnnnnnnnnnnnnnnnnnnnnnnnnnnnnnnnnnnnnnnnnnnnnnnnnnnnnnnnnnnnnnnnnnnnnnnnnnnnnnnnnnnnnnnnnnnnnnnnnnnnnnnnnnnnnnnnnnnnnnnnnnnnnnnnnnnnnnnnnnnnnnnnnnnnnnnnnnnnnnnnnnnnnnnnnnnnnnnnnnnnnnnnnnnnnnnnnnnnnnnnnnnnnnnnnnnnnnnnnnnnnnnnnnnnnnnnnnnnnnnnnnnnnnnnnnnnnnnnnnnnnnnnnnnnnnnnnnnnnnnnnnnnnnnnnnnnnnnnnnnnnnnnnnnnnnnnnnnnnnnnnnnnnnnnnnnnnnnnnnnnnnnnnnnnnnnnnnnnnnnnnnnnnnnnnnnnnnnnnnnnnnnnnnnnnnnnnnnnnnnnnnnnnnnnnnnnnnnnnnnnnnnnnnnnnnnnnnnnnnnnnnnnnnnnnnnnnnnnnnnnnnnnnnnnnnnnnnnnnnnnnnnnnnnnnnnnnnnnnnnnnnnnnnnnnnnnnnnnnnnnnnnnnnnnnnnnnnnnnnnnnnnnnnnnnnnnnnnnnnnnnnnnnnnnnnnnnnnnnnnnnnnnnnnnnnnnnnnnnnnnnnnnnnnnnnnnnnnnnnnnnnnnnnnnnnnnnnnnnnnnnnnnnnnnnnnnnnnnnnnnnnnnnnnnnnnnnnnnnnnnnnnnnnnnnnnnnnnnnnnnnnnnnnnnnnnnnnnnnnnnnnnnnnnnnnnnnnnnnnnnnnnnnnnnnnnnnnnnnnnnnnnnnnnnnnnnnnnnnnnnnnnnnnnnnnnnnnnnnnnnnnnnnnnnnnnnnnnnnnnnnnnnnnnnnnnnnnnnnnnnnnnnnnnnnnnnnnnnnnnnnnnnnnnnnnnnnnnnnnnnnnnnnnnnnnnnnnnnnnnnnnnnnnnnnnnnnnnnnnnnnnnnnnnnnnnnnnnnnnnnnnnnnnnnnnnnnnnnnnnnnnnnnnnnnnnnnnnnnnnnnnnnnnnnnnnnnnnnnnnnnnnnnnnnnnnnnnnnnnnnnnnnnnnnnnnnnnnnnnnnnnnnnnnnnnnnnnnnnnnnnnnnnnnnnnnnnnnnnnnnnnnnnnnnnnnnnnnnnnnnnnnnnnnnnnnnnnnnnnnnnnnnnnnnnnnnnnnnnnnnnnnnnnnnnnnnnnnnnnnnnnnnnnnnnnnnnnnnnnnnnnnnnnnnnnnnnnnnnnnnnnnnnnnnnnnnnnnnnnnnnnnnnnnnnnnnnnnnnnnnnnnnnnnnnnnnnnnnnnnnnnnnnnnnnnnnnnnnnnnnnnnnnnnnnnnnnnnnnnnnnnnnnnnnnnnnnnnnnnnnnnnnnnnnnnnnnnnnnnnnnnnnnnnnnnnnnnnnnnnnnnnnnnnnnnnnnnnnnnnnnnnnnnnnnnnnnnnnnnnnnnnnnnnnnnnnnnnnnnnnnnnnnnnnnnnnnnnnnnnnnnnnnnnnnnnnnnnnnnnnnnnnnnnnnnnnnnnnnnnnnnnnnnnnnnnnnnnnnnnnnnnnnnnnnnnnnnnnnnnnnnnnnnnnnnnnnnnnnnnnnnnnnnnnnnnnnnnnnnnnnnnnnnnnnnnnnnnnnnnnnnnnnnnnnnnnnnnnnnnnnnnnnnnnnnnnnnnnnnnnnnnnnnnnnnnnnnnnnnnnnnnnnnnnnnnnnnnnnnnnnnnnnnnnnnnnnnnnnnnnnnnnnnnnnnnnnnnnnnnnnnnnnnnnnnnnnnnnnnnnnnnnnnnnnnnnnnnnnnnnnnnnnnnnnnnnnnnnnnnnnnnnnnnnnnnnnnnnnnnnnnnnnnnnnnnnnnnnnnnnnnnnnnnnnnnnnnnnnnnnnnnnnnnnnnnnnnnnnnnnnnnnnnnnnnnnnnnnnnnnnnnnnnnnnnnnnnnnnnnnnnnnnnnnnnnnnnnnnnnnnnnnnnnnnnnnnnnnnnnnnnnnnnnnnnnnnnnnnnnnnnnnnnnnnnnnnnnnnnnnnnnnnnnnnnnnnnnnnnnnnnnnnnnnnnnnnnnnnnnnnnnnnnnnnnnnnnnnnnnnnnnnnnnnnnnnnnnnnnnnnnnnnnnnnnnnnnnnnnnnnnnnnnnnnnnnnnnnnnnnnnnnnnnnnnnnnnnnnnnnnnnnnnnnnnnnnnnnnnnnnnnnnnnnnnnnnnnnnnnnnnnnnnnnnnnnnnnnnnnnnnnnnnnnnnnnnnnnnnnnnnnnnnnnnnnnnnnnnnnnnnnnnnnnnnnnnnnnnnnnnnnnnnnnnnnnnnnnnnnnnnnnnnnnnnnnnnnnnnnnnnnnnnnnnnnnnnnnnnnnnnnnnnnnnnnnnnnnnnnnnnnnnnnnnnnnnnnnnnnnnnnnnnnnnnnnnnnnnnnnnnnnnnnnnnnnnnnnnnnnnnnnnnnnnnnnnnnnnnnnnnnnnnnnnnnnnnnnnnnnnnnnnnnnnnnnnnnnnnnnnnnnnnnnnnnnnnnnnnnnnnnnnnnnnnnnnnnnnnnnnnnnnnnnnnnnnnnnnnnnnnnnnnnnnnnnnnnnnnnnnnnnnnnnnnnnnnnnnnnnnnnnnnnnnnnnnnnnnnnnnnnnnnnnnnnnnnnnnnnnnnnnnnnnnnnnnnnnnnnnnnnnnnnnnnnnnnnnnnnnnnnnnnnnnnnnnnnnnnnnnnnnnnnnnnnnnnnnnnnnnnnnnnnnnnnnnnnnnnnnnnnnnnnnnnnnnnnnnnnnnnnnnnnnnnnnnnnnnnnnnnnnnnnnnnnnnnnnnnnnnnnnnnnnnnnnnnnnnnnnnnnnnnnnnnnnnnnnnnnnnnnnnnnnnnnnnnnnnnnnnnnnnnnnnnnnnnnnnnnnnnnnnnnnnnnnnnnnnnnnnnnnnnnnnnnnnnnnnnnnnnnnnnnnnnnnnnnnnnnnnnnnnnnnnnnnnnnnnnnnnnnnnnnnnnnnnnnnnnnnnnnnnnnnnnnnnnnnnnnnnnnnnnnnnnnnnnnnnnnnnnnnnnnnnnnnnnnnnnnnnnnnnnnnnnnnnnnnnnnnnnnnnnnnnnnnnnnnnnnnnnnnnnnnnnnnnnnnnnnnnnnnnnnnnnnnnnnnnnnnnnnnnnnnnnnnnnnnnnnnnnnnnnnnnnnnnnnnnnnnnnnnnnnnnnnnnnnnnnnnnnnnnnnnnnnnnnnnnnnnnnnnnnnnnnnnnnnnnnnnnnnnnnnnnnnnnnnnnnnnnnnnnnnnnnnnnnnnnnnnnnnnnnnnnnnnnnnnnnnnnnnnnnnnnnnnnnnnnnnnnnnnnnnnnnnnnnnnnnnnnnnnnnnnnnnnnnnnnnnnnnnnnnnnnnnnnnnnnnnnnnnnnnnnnnnnnnnnnnnnnnnnnnnnnnnnnnnnnnnnnnnnnnnnnnnnnnnnnnnnnnnnnnnnnnnnnnnnnnnnnnnnnnnnnnnnnnnnnnnnnnnnnnnnnnnnnnnnnnnnnnnnnnnnnnnnnnnnnnnnnnnnnnnnnnnnnnnnnnnnnnnnnnnnnnnnnnnnnnnnnnnnnnnnnnnnnnnnnnnnnnnnnnnnnnnnnnnnnnnnnnnnnnnnnnnnnnnnnnnnnnnnnnnnnnnnnnnnnnnnnnnnnnnnnnnnnnnnnnnnnnnnnnnnnnnnnnnnnnnnnnnnnnnnnnnnnnnnnnnnnnnnnnnnnnnnnnnnnnnnnnnnnnnnnnnnnnnnnnnnnnnnnnnnnnnnnnnnnnnnnnnnnnnnnnnnnnnnnnnnnnnnnnnnnnnnnnnnnnnnnnnnnnnnnnnnnnnnnnnnnnnnnnnnnnnnnnnnnnnnnnnnnnnnnnnnnnnnnnnnnnnnnnnnnnnnnnnnnnnnnnnnnnnnnnnnnnnnnnnnnnnnnnnnnnnnnnnnnnnnnnnnnnnnnnnnnnnnnnnnnnnnnnnnnnnnnnnnnnnnnnnnnnnnnnnnnnnnnnnnnnnnnnnnnnnnnnnnnnnnnnnnnnnnnnnnnnnnnnnnnnnnnnnnnnnnnnnnnnnnnnnnnnnnnnnnnnnnnnnnnnnnnnnnnnnnnnnnnnnnnnnnnnnnnnnnnnnnnnnnnnnnnnnnnnnnnnnnnnnnnnnnnnnnnnnnnnnnnnnnnnnnnnnnnnnnnnnnnnnnnnnnnnnnnnnnnnnnnnnnnnnnnnnnnnnnnnnnnnnnnnnnnnnnnnnnnnnnnnnnnnnnnnnnnnnnnnnnnnnnnnnnnnnnnnnnnnnnnnnnnnnnnnnnnnnnnnnnnnnnnnnnnnnnnnnnnnnnnnnnnnnnnnnnnnnnnnnnnnnnnnnnnnnnnnnnnnnnnnnnnnnnnnnnnnnnnnnnnnnnnnnnnnnnnnnnnnnnnnnnnnnnnnnnnnnnnnnnnnnnnnnnnnnnnnnnnnnnnnnnnnnnnnnnnnnnnnnnnnnnnnnnnnnnnnnnnnnnnnnnnnnnnnnnnnnnnnnnnnnnnnnnnnnnnnnnnnnnnnnnnnnnnnnnnnnnnnnnnnnnnnnnnnnnnnnnnnnnnnnnnnnnnnnnnnnnnnnnnnnnnnnnnnnnnnnnnnnnnnnnnnnnnnnnnnnnnnnnnnnnnnnnnnnnnnnnnnnnnnnnnnnnnnnnnnnnnnnnnnnnnnnnnnnnnnnnnnnnnnnnnnnnnnnnnnnnnnnnnnnnnnnnnnnnnnnnnnnnnnnnnnnnnnnnnnnnnnnnnnnnnnnnnnnnnnnnnnnnnnnnnnnnnnnnnnnnnnnnnnnnnnnnnnnnnnnnnnnnnnnnnnnnnnnnnnnnnnnnnnnnnnnnnnnnnnnnnnnnnnnnnnnnnnnnnnnnnnnnnnnnnnnnnnnnnnnnnnnnnnnnnnnnnnnnnnnnnnnnnnnnnnnnnnnnnnnnnnnnnnnnnnnnnnnnnnnnnnnnnnnnnnnnnnnnnnnnnnnnnnnnnnnnnnnnnnnnnnnnnnnnnnnnnnnnnnnnnnnnnnnnnnnnnnnnnnnnnnnnnnnnnnnnnnnnnnnnnnnnnnnnnnnnnnnnnnnnnnnnnnnnnnnnnnnnnnnnnnnnnnnnnnnnnnnnnnnnnnnnnnnnnnnnnnnnnnnnnnnnnnnnnnnnnnnnnnnnnnnnnnnnnnnnnnnnnnnnnnnnnnnnnnnnnnnnnnnnnnnnnnnnnnnnnnnnnnnnnnnnnnnnnnnnnnnnnnnnnnnnnnnnnnnnnnnnnnnnnnnnnnnnnnnnnnnnnnnnnnnnnnnnnnnnnnnnnnnnnnnnnnnnnnnnnnnnnnnnnnnnnnnnnnnnnnnnnnnnnnnnnnnnnnnnnnnnnnnnnnnnnnnnnnnnnnnnnnnnnnnnnnnnnnnnnnnnnnnnnnnnnnnnnnnnnnnnnnnnnnnnnnnnnnnnnnnnnnnnnnnnnnnnnnnnnnnnnnnnnnnnnnnnnnnnnnnnnnnnnnnnnnnnnnnnnnnnnnnnnnnnnnnnnnnnnnnnnnnnnnnnnnnnnnnnnnnnnnnnnnnnnnnnnnnnnnnnnnnnnnnnnnnnnnnnnnnnnnnnnnnnnnnnnnnnnnnnnnnnnnnnnnnnnnnnnnnnnnnnnnnnnnnnnnnnnnnnnnnnnnnnnnnnnnnnnnnnnnnnnnnnnnnnnnnnnnnnnnnnnnnnnnnnnnnnnnnnnnnnnnnnnnnnnnnnnnnnnnnnnnnnnnnnnnnnnnnnnnnnnnnnnnnnnnnnnnnnnnnnnnnnnnnnnnnnnnnnnnnnnnnnnnnnnnnnnnnnnnnnnnnnnnnnnnnnnnnnnnnnnnnnnnnnnnnnnnnnnnnnnnnnnnnnnnnnnnnnnnnnnnnnnnnnnnnnnnnnnnnnnnnnnnnnnnnnnnnnnnnnnnnnnnnnnnnnnnnnnnnnnnnnnnnnnnnnnnnnnnnnnnnnnnnnnnnnnnnnnnnnnnnnnnnnnnnnnnnnnnnnnnnnnnnnnnnnnnnnnnnnnnnnnnnnnnnnnnnnnnnnnnnnnnnnnnnnnnnnnnnnnnnnnnnnnnnnnnnnnnnnnnnnnnnnnnnnnnnnnnnnnnnnnnnnnnnnnnnnnnnnnnnnnnnnnnnnnnnnnnnnnnnnnnnnnnnnnnnnnnnnnnnnnnnnnnnnnnnnnnnnnnnnnnnnnnnnnnnnnnnnnnnnnnnnnnnnnnnnnnnnnnnnnnnnnnnnnnnnnnnnnnnnnnnnnnnnnnnnnnnnnnnnnnnnnnnnnnnnnnnnnnnnnnnnnnnnnnnnnnnnnnnnnnnnnnnnnnnnnnnnnnnnnnnnnnnnnnnnnnnnnnnnnnnnnnnnnnnnnnnnnnnnnnnnnnnnnnnnnnnnnnnnnnnnnnnnnnnnnnnnnnnnnnnnnnnnnnnnnnnnnnnnnnnnnnnnnnnnnnnnnnnnnnnnnnnnnnnnnnnnnnnnnnnnnnnnnnnnnnnnnnnnnnnnnnnnnnnnnnnnnnnnnnnnnnnnnnnnnnnnnnnnnnnnnnnnnnnnnnnnnnnnnnnnnnnnnnnnnnnnnnnnnnnnnnnnnnnnnnnnnnnnnnnnnnnnnnnnnnnnnnnnnnnnnnnnnnnnnnnnnnnnnnnnnnnnnnnnnnnnnnnnnnnnnnnnnnnnnnnnnnnnnnnnnnnnnnnnnnnnnnnnnnnnnnnnnnnnnnnnnnnnnnnnnnnnnnnnnnnnnnnnnnnnnnnnnnnnnnnnnnnnnnnnnnnnnnnnnnnnnnnnnnnnnnnnnnnnnnnnnnnnnnnnnnnnnnnnnnnnnnnnnnnnnnnnnnnnnnnnnnnnnnnnnnnnnnnnnnnnnnnnnnnnnnnnnnnnnnnnnnnnnnnnnnnnnnnnnnnnnnnnnnnnnnnnnnnnnnnnnnnnnnnnnnnnnnnnnnnnnnnnnnnnnnnnnnnnnnnnnnnnnnnnnnnnnnnnnnnnnnnnnnnnnnnnnnnnnnnnnnnnnnnnnnnnnnnnnnnnnnnnnnnnnnnnnnnnnnnnnnnnnnnnnnnnnnnnnnnnnnnnnnnnnnnnnnnnnnnnnnnnnnnnnnnnnnnnnnnnnnnnnnnnnnnnnnnnnnnnnnnnnnnnnnnnnnnnnnnnnnnnnnnnnnnnnnnnnnnnnnnnnnnnnnnnnnnnnnnnnnnnnnnnnnnnnnnnnnnnnnnnnnnnnnnnnnnnnnnnnnnnnnnnnnnnnnnnnnnnnnnnnnnnnnnnnnnnnnnnnnnnnnnnnnnnnnnnnnnnnnnnnnnnnnnnnnnnnnnnnnnnnnnnnnnnnnnnnnnnnnnnnnnnnnnnnnnnnnnnnnnnnnnnnnnnnnnnnnnnnnnnnnnnnnnnnnnnnnnnnnnnnnnnnnnnnnnnnnnnnnnnnnnnnnnnnnnnnnnnnnnnnnnnnnnnnnnnnnnnnnnnnnnnnnnnnnnnnnnnnnnnnnnnnnnnnnnnnnnnnnnnnnnnnnnnnnnnnnnnnnnnnnnnnnnnnnnnnnnnnnnnnnnnnnnnnnnnnnnnnnnnnnnnnnnnnnnnnnnnnnnnnnnnnnnnnnnnnnnnnnnnnnnnnnnnnnnnnnnnnnnnnnnnnnnnnnnnnnnnnnnnnnnnnnnnnnnnnnnnnnnnnnnnnnnnnnnnnnnnnnnnnnnnnnnnnnnnnnnnnnnnnnnnnnnnnnnnnnnnnnnnnnnnnnnnnnnnnnnnnnnnnnnnnnnnnnnnnnnnnnnnnnnnnnnnnnnnnnnnnnnnnnnnnnnnnnnnnnnnnnnnnnnnnnnnnnnnnnnnnnnnnnnnnnnnnnnnnnnnnnnnnnnnnnnnnnnnnnnnnnnnnnnnnnnnnnnnnnnnnnnnnnnnnnnnnnnnnnnnnnnnnnnnnnnnnnnnnnnnnnnnnnnnnnnnnnnnnnnnnnnnnnnnnnnnnnnnnnnnnnnnnnnnnnnnnnnnnnnnnnnnnnnnnnnnnnnnnnnnnnnnnnnnnnnnnnnnnnnnnnnnnnnnnnnnnnnnnnnnnnnnnnnnnnnnnnnnnnnnnnnnnnnnnnnnnnnnnnnnnnnnnnnnnnnnnnnnnnnnnnnnnnnnnnnnnnnnnnnnnnnnnnnnnnnnnnnnnnnnnnnnnnnnnnnnnnnnnnnnnnnnnnnnnnnnnnnnnnnnnnnnnnnnnnnnnnnnnnnnnnnnnnnnnnnnnnnnnnnnnnnnnnnnnnnnnnnnnnnnnnnnnnnnnnnnnnnnnnnnnnnnnnnnnnnnnnnnnnnnnnnnnnnnnnnnnnnnnnnnnnnnnnnnnnnnnnnnnnnnnnnnnnnnnnnnnnnnnnnnnnnnnnnnnnnnnnnnnnnnnnnnnnnnnnnnnnnnnnnnnnnnnnnnnnnnnnnnnnnnnnnnnnnnnnnnnnnnnnnnnnnnnnnnnnnnnnnnnnnnnnnnnnnnnnnnnnnnnnnnnnnnnnnnnnnnnnnnnnnnnnnnnnnnnnnnnnnnnnnnnnnnnnnnnnnnnnnnnnnnnnnnnnnnnnnnnnnnnnnnnnnnnnnnnnnnnnnnnnnnnnnnnnnnnnnnnnnnnnnnnnnnnnnnnnnnnnnnnnnnnnnnnnnnnnnnnnnnnnnnnnnnnnnnnnnnnnnnnnnnnnnnnnnnnnnnnnnnnnnnnnnnnnnnnnnnnnnnnnnnnnnnnnnnnnnnnnnnnnnnnnnnnnnnnnnnnnnnnnnnnnnnnnnnnnnnnnnnnnnnnnnnnnnnnnnnnnnnnnnnnnnnnnnnnnnnnnnnnnnnnnnnnnnnnnnnnnnnnnnnnnnnnnnnnnnnnnnnnnnnnnnnnnnnnnnnnnnnnnnnnnnnnnnnnnnnnnnnnnnnnnnnnnnnnnnnnnnnnnnnnnnnnnnnnnnnnnnnnnnnnnnnnnnnnnnnnnnnnnnnnnnnnnnnnnnnnnnnnnnnnnnnnnnnnnnnnnnnnnnnnnnnnnnnnnnnnnnnnnnnnnnnnnnnnnnnnnnnnnnnnnnnnnnnnnnnnnnnnnnnnnnnnnnnnnnnnnnnnnnnnnnnnnnnnnnnnnnnnnnnnnnnnnnnnnnnnnnnnnnnnnnnnnnnnnnnnnnnnnnnnnnnnnnnnnnnnnnnnnnnnnnnnnnnnnnnnnnnnnnnnnnnnnnnnnnnnnnnnnnnnnnnnnnnnnnnnnnnnnnnnnnnnnnnnnnnnnnnnnnnnnnnnnnnnnnnnnnnnnnnnnnnnnnnnnnnnnnnnnnnnnnnnnnnnnnnnnnnnnnnnnnnnnnnnnnnnnnnnnnnnnnnnnnnnnnnnnnnnnnnnnnnnnnnnnnnnnnnnnnnnnnnnnnnnnnnnnnnnnnnnnnnnnnnnnnnnnnnnnnnnnnnnnnnnnnnnnnnnnnnnnnnnnnnnnnnnnnnnnnnnnnnnnnnnnnnnnnnnnnnnnnnnnnnnnnnnnnnnnnnnnnnnnnnnnnnnnnnnnnnnnnnnnnnnnnnnnnnnnnnnnnnnnnnnnnnnnnnnnnnnnnnnnnnnnnnnnnnnnnnnnnnnnnnnnnnnnnnnnnnnnnnnnnnnnnnnnnnnnnnnnnnnnnnnnnnnnnnnnnnnnnnnnnnnnnnnnnnnnnnnnnnnnnnnnnnnnnnnnnnnnnnnnnnnnnnnnnnnnnnnnnnnnnnnnnnnnnnnnnnnnnnnnnnnnnnnnnnnnnnnnnnnnnnnnnnnnnnnnnnnnnnnnnnnnnnnnnnnnnnnnnnnnnnnnnnnnnnnnnnnnnnnnnnnnnnnnnnnnnnnnnnnnnnnnnnnnnnnnnnnnnnnnnnnnnnnnnnnnnnnnnnnnnnnnnnnnnnnnnnnnnnnnnnnnnnnnnnnnnnnnnnnnnnnnnnnnnnnnnnnnnnnnnnnnnnnnnnnnnnnnnnnnnnnnnnnnnnnnnnnnnnnnnnnnnnnnnnnnnnnnnnnnnnnnnnnnnnnnnnnnnnnnnnnnnnnnnnnnnnnnnnnnnnnnnnnnnnnnnnnnnnnnnnnnnnnnnnnnnnnnnnnnnnnnnnnnnnnnnnnnnnnnnnnnnnnnnnnnnnnnnnnnnnnnnnnnnnnnnnnnnnnnnnnnnnnnnnnnnnnnnnnnnnnnnnnnnnnnnnnnnnnnnnnnnnnnnnnnnnnnnnnnnnnnnnnnnnnnnnnnnnnnnnnnnnnnnnnnnnnnnnnnnnnnnnnnnnnnnnnnnnnnnnnnnnnnnnnnnnnnnnnnnnnnnnnnnnnnnnnnnnnnnnnnnnnnnnnnnnnnnnnnnnnnnnnnnnnnnnnnnnnnnnnnnnnnnnnnnnnnnnnnnnnnnnnnnnnnnnnnnnnnnnnnnnnnnnnnnnnnnnnnnnnnnnnnnnnnnnnnnnnnnnnnnnnnnnnnnnnnnnnnnnnnnnnnnnnnnnnnnnnnnnnnnnnnnnnnnnnnnnnnnnnnnnnnnnnnnnnnnnnnnnnnnnnnnnnnnnnnnnnnnnnnnnnnnnnnnnnnnnnnnnnnnnnnnnnnnnnnnnnnnnnnnnnnnnnnnnnnnnnnnnnnnnnnnnnnnnnnnnnnnnnnnnnnnnnnnnnnnnnnnnnnnnnnnnnnnnnnnnnnnnnnnnnnnnnnnnnnnnnnnnnnnnnnnnnnnnnnnnnnnnnnnnnnnnnnnnnnnnnnnnnnnnnnnnnnnnnnnnnnnnnnnnnnnnnnnnnnnnnnnnnnnnnnnnnnnnnnnnnnnnnnnnnnnnnnnnnnnnnnnnnnnnnnnnnnnnnnnnnnnnnnnnnnnnnnnnnnnnnnnnnnnnnnnnnnnnnnnnnnnnnnnnnnnnnnnnnnnnnnnnnnnnnnnnnnnnnnnnnnnnnnnnnnnnnnnnnnnnnnnnnnnnnnnnnnnnnnnnnnnnnnnnnnnnnnnnnnnnnnnnnnnnnnnnnnnnnnnnnnnnnnnnnnnnnnnnnnnnnnnnnnnnnnnnnnnnnnnnnnnnnnnnnnnnnnnnnnnnnnnnnnnnnnnnnnnnnnnnnnnnnnnnnnnnnnnnnnnnnnnnnnnnnnnnnnnnnnnnnnnnnnnnnnnnnnnnnnnnnnnnnnnnnnnnnnnnnnnnnnnnnnnnnnnnnnnnnnnnnnnnnnnnnnnnnnnnnnnnnnnnnnnnnnnnnnnnnnnnnnnnnnnnnnnnnnnnnnnnnnnnnnnnnnnnnnnnnnnnnnnnnnnnnnnnnnnnnnnnnnnnnnnnnnnnnnnnnnnnnnnnnnnnnnnnnnnnnnnnnnnnnnnnnnnnnnnnnnnnnnnnnnnnnnnnnnnnnnnnnnnnnnnnnnnnnnnnnnnnnnnnnnnnnnnnnnnnnnnnnnnnnnnnnnnnnnnnnnnnnnnnnnnnnnnnnnnnnnnnnnnnnnnnnnnnnnnnnnnnnnnnnnnnnnnnnnnnnnnnnnnnnnnnnnnnnnnnnnnnnnnnnnnnnnnnnnnnnnnnnnnnnnnnnnnnnnnnnnnnnnnnnnnnnnnnnnnnnnnnnnnnnnnnnnnnnnnnnnnnnnnnnnnnnnnnnnnnnnnnnnnnnnnnnnnnnnnnnnnnnnnnnnnnnnnnnnnnnnnnnnnnnnnnnnnnnnnnnnnnnnnnnnnnnnnnnnnnnnnnnnnnnnnnnnnnnnnnnnnnnnnnnnnnnnnnnnnnnnnnnnnnnnnnnnnnnnnnnnnnnnnnnnnnnnnnnnnnnnnnnnnnnnnnnnnnnnnnnnnnnnnnnnnnnnnnnnnnnnnnnnnnnnnnnnnnnnnnnnnnnnnnnnnnnnnnnnnnnnnnnnnnnnnnnnnnnnnnnnnnnnnnnnnnnnnnnnnnnnnnnnnnnnnnnnnnnnnnnnnnnnnnnnnnnnnnnnnnnnnnnnnnnnnnnnnnnnnnnnnnnnnnnnnnnnnnnnnnnnnnnnnnnnnnnnnnnnnnnnnnnnnnnnnnnnnnnnnnnnnnnnnnnnnnnnnnnnnnnnnnnnnnnnnnnnnnnnnnnnnnnnnnnnnnnnnnnnnnnnnnnnnnnnnnnnnnnnnnnnnnnnnnnnnnnnnnnnnnnnnnnnnnnnnnnnnnnnnnnnnnnnnnnnnnnnnnnnnnnnnnnnnnnnnnnnnnnnnnnnnnnnnnnnnnnnnnnnnnnnnnnnnnnnnnnnnnnnnnnnnnnnnnnnnnnnnnnnnnnnnnnnnnnnnnnnnnnnnnnnnnnnnnnnnnnnnnnnnnnnnnnnnnnnnnnnnnnnnnnnnnnnnnnnnnnnnnnnnnnnnnnnnnnnnnnnnnnnnnnnnnnnnnnnnnnnnnnnnnnnnnnnnnnnnnnnnnnnnnnnnnnnnnnnnnnnnnnnnnnnnnnnnnnnnnnnnnnnnnnnnnnnnnnnnnnnnnnnnnnnnnnnnnnnnnnnnnnnnnnnnnnnnnnnnnnnnnnnnnnnnnnnnnnnnnnnnnnnnnnnnnnnnnnnnnnnnnnnnnnnnnnnnnnnnnnnnnnnnnnnnnnnnnnnnnnnnnnnnnnnnnnnnnnnnnnnnnnnnnnnnnnnnnnnnnnnnnnnnnnnnnnnnnnnnnnnnnnnnnnnnnnnnnnnnnnnnnnnnnnnnnnnnnnnnnnnnnnnnnnnnnnnnnnnnnnnnnnnnnnnnnnnnnnnnnnnnnnnnnnnnnnnnnnnnnnnnnnnnnnnnnnnnnnnnnnnnnnnnnnnnnnnnnnnnnnnnnnnnnnnnnnnnnnnnnnnnnnnnnnnnnnnnnnnnnnnnnnnnnnnnnnnnnnnnnnnnnnnnnnnnnnnnnnnnnnnnnnnnnnnnnnnnnnnnnnnnnnnnnnnnnnnnnnnnnnnnnnnnnnnnnnnnnnnnnnnnnnnnnnnnnnnnnnnnnnnnnnnnnnnnnnnnnnnnnnnnnnnnnnnnnnnnnnnnnnnnnnnnnnnnnnnnnnnnnnnnnnnnnnnnnnnnnnnnnnnnnnnnnnnnnnnnnnnnnnnnnnnnnnnnnnnnnnnnnnnnnnnnnnnnnnnnnnnnnnnnnnnnnnnnnnnnnnnnnnnnnnnnnnnnnnnnnnnnnnnnnnnnnnnnnnnnnnnnnnnnnnnnnnnnnnnnnnnnnnnnnnnnnnnnnnnnnnnnnnnnnnnnnnnnnnnnnnnnnnnnnnnnnnnnnnnnnnnnnnnnnnnnnnnnnnnnnnnnnnnnnnnnnnnnnnnnnnnnnnnnnnnnnnnnnnnnnnnnnnnnnnnnnnnnnnnnnnnnnnnnnnnnnnnnnnnnnnnnnnnnnnnnnnnnnnnnnnnnnnnnnnnnnnnnnnnnnnnnnnnnnnnnnnnnnnnnnnnnnnnnnnnnnnnnnnnnnnnnnnnnnnnnnnnnnnnnnnnnnnnnnnnnnnnnnnnnnnnnnnnnnnnnnnnnnnnnnnnnnnnnnnnnnnnnnnnnnnnnnnnnnnnnnnnnnnnnnnnnnnnnnnnnnnnnnnnnnnnnnnnnnnnnnnnnnnnnnnnnnnnnnnnnnnnnnnnnnnnnnnnnnnnnnnnnnnnnnnnnnnnnnnnnnnnnnnnnnnnnnnnnnnnnnnnnnnnnnnnnnnnnnnnnnnnnnnnnnnnnnnnnnnnnnnnnnnnnnnnnnnnnnnnnnnnnnnnnnnnnnnnnnnnnnnnnnnnnnnnnnnnnnnnnnnnnnnnnnnnnnnnnnnnnnnnnnnnnnnnnnnnnnnnnnnnnnnnnnnnnnnnnnnnnnnnnnnnnnnnnnnnnnnnnnnnnnnnnnnnnnnnnnnnnnnnnnnnnnnnnnnnnnnnnnnnnnnnnnnnnnnnnnnnnnnnnnnnnnnnnnnnnnnnnnnnnnnnnnnnnnnnnnnnnnnnnnnnnnnnnnnnnnnnnnnnnnnnnnnnnnnnnnnnnnnnnnnnnnnnnnnnnnnnnnnnnnnnnnnnnnnnnnnnnnnnnnnnnnnnnnnnnnnnnnnnnnnnnnnnnnnnnnnnnnnnnnnnnnnnnnnnnnnnnnnnnnnnnnnnnnnnnnnnnnnnnnnnnnnnnnnnnnnnnnnnnnnnnnnnnnnnnnnnnnnnnnnnnnnnnnnnnnnnnnnnnnnnnnnnnnnnnnnnnnnnnnnnnnnnnnnnnnnnnnnnnnnnnnnnnnnnnnnnnnnnnnnnnnnnnnnnnnnnnnnnnnnnnnnnnnnnnnnnnnnnnnnnnnnnnnnnnnnnnnnnnnnnnnnnnnnnnnnnnnnnnnnnnnnnnnnnnnnnnnnnnnnnnnnnnnnnnnnnnnnnnnnnnnnnnnnnnnnnnnnnnnnnnnnnnnnnnnnnnnnnnnnnnnnnnnnnnnnnnnnnnnnnnnnnnnnnnnnnnnnnnnnnnnnnnnnnnnnnnnnnnnnnnnnnnnnnnnnnnnnnnnnnnnnnnnnnnnnnnnnnnnnnnnnnnnnnnnnnnnnnnnnnnnnnnnnnnnnnnnnnnnnnnnnnnnnnnnnnnnnnnnnnnnnnnnnnnnnnnnnnnnnnnnnnnnnnnnnnnnnnnnnnnnnnnnnnnnnnnnnnnnnnnnnnnnnnnnnnnnnnnnnnnnnnnnnnnnnnnnnnnnnnnnnnnnnnnnnnnnnnnnnnnnnnnnnnnnnnnnnnnnnnnnnnnnnnnnnnnnnnnnnnnnnnnnnnnnnnnnnnnnnnnnnnnnnnnnnnnnnnnnnnnnnnnnnnnnnnnnnnnnnnnnnnnnnnnnnnnnnnnnnnnnnnnnnnnnnnnnnnnnnnnnnnnnnnnnnnnnnnnnnnnnnnnnnnnnnnnnnnnnnnnnnnnnnnnnnnnnnnnnnnnnnnnnnnnnnnnnnnnnnnnnnnnnnnnnnnnnnnnnnnnnnnnnnnnnnnnnnnnnnnnnnnnnnnnnnnnnnnnnnnnnnnnnnnnnnnnnnnnnnnnnnnnnnnnnnnnnnnnnnnnnnnnnnnnnnnnnnnnnnnnnnnnnnnnnnnnnnnnnnnnnnnnnnnnnnnnnnnnnnnnnnnnnnnnnnnnnnnnnnnnnnnnnnnnnnnnnnnnnnnnnnnnnnnnnnnnnnnnnnnnnnnnnnnnnnnnnnnnnnnnnnnnnnnnnnnnnnnnnnnnnnnnnnnnnnnnnnnnnnnnnnnnnnnnnnnnnnnnnnnnnnnnnnnnnnnnnnnnnnnnnnnnnnnnnnnnnnnnnnnnnnnnnnnnnnnnnnnnnnnnnnnnnnnnnnnnnnnnnnnnnnnnnnnnnnnnnnnnnnnnnnnnnnnnnnnnnnnnnnnnnnnnnnnnnnnnnnnnnnnnnnnnnnnnnnnnnnnnnnnnnnnnnnnnnnnnnnnnnnnnnnnnnnnnnnnnnnnnnnnnnnnnnnnnnnnnnnnnnnnnnnnnnnnnnnnnnnnnnnnnnnnnnnnnnnnnnnnnnnnnnnnnnnnnnnnnnnnnnnnnnnnnnnnnnnnnnnnnnnnnnnnnnnnnnnnnnnnnnnnnnnnnnnnnnnnnnnnnnnnnnnnnnnnnnnnnnnnnnnnnnnnnnnnnnnnnnnnnnnnnnnnnnnnnnnnnnnnnnnnnnnnnnnnnnnnnnnnnnnnnnnnnnnnnnnnnnnnnnnnnnnnnnnnnnnnnnnnnnnnnnnnnnnnnnnnnnnnnnnnnnnnnnnnnnnnnnnnnnnnnnnnnnnnnnnnnnnnnnnnnnnnnnnnnnnnnnnnnnnnnnnnnnnnnnnnnnnnnnnnnnnnnnnnnnnnnnnnnnnnnnnnnnnnnnnnnnnnnnnnnnnnnnnnnnnnnnnnnnnnnnnnnnnnnnnnnnnnnnnnnnnnnnnnnnnnnnnnnnnnnnnnnnnnnnnnnnnnnnnnnnnnnnnnnnnnnnnnnnnnnnnnnnnnnnnnnnnnnnnnnnnnnnnnnnnnnnnnnnnnnnnnnnnnnnnnnnnnnnnnnnnnnnnnnnnnnnnnnnnnnnnnnnnnnnnnnnnnnnnnnnnnnnnnnnnnnnnnnnnnnnnnnnnnnnnnnnnnnnnnnnnnnnnnnnnnnnnnnnnnnnnnnnnnnnnnnnnnnnnnnnnnnnnnnnnnnnnnnnnnnnnnnnnnnnnnnnnnnnnnnnnnnnnnnnnnnnnnnnnnnnnnnnnnnnnnnnnnnnnnnnnnnnnnnnnnnnnnnnnnnnnnnnnnnnnnnnnnnnnnnnnnnnnnnnnnnnnnnnnnnnnnnnnnnnnnnnnnnnnnnnnnnnnnnnnnnnnnnnnnnnnnnnnnnnnnnnnnnnnnnnnnnnnnnnnnnnnnnnnnnnnnnnnnnnnnnnnnnnnnnnnnnnnnnnnnnnnnnnnnnnnnnnnnnnnnnnnnnnnnnnnnnnnnnnnnnnnnnnnnnnnnnnnnnnnnnnnnnnnnnnnnnnnnnnnnnnnnnnnnnnnnnnnnnnnnnnnnnnnnnnnnnnnnnnnnnnnnnnnnnnnnnnnnnnnnnnnnnnnnnnnnnnnnnnnnnnnnnnnnnnnnnnnnnnnnnnnnnnnnnnnnnnnnnnnnnnnnnnnnnnnnnnnnnnnnnnnnnnnnnnnnnnnnnnnnnnnnnnnnnnnnnnnnnnnnnnnnnnnnnnnnnnnnnnnnnnnnnnnnnnnnnnnnnnnnnnnnnnnnnnnnnnnnnnnnnnnnnnnnnnnnnnnnnnnnnnnnnnnnnnnnnnnnnnnnnnnnnnnnnnnnnnnnnnnnnnnnnnnnnnnnnnnnnnnnnnnnnnnnnnnnnnnnnnnnnnnnnnnnnnnnnnnnnnnnnnnnnnnnnnnnnnnnnnnnnnnnnnnnnnnnnnnnnnnnnnnnnnnnnnnnnnnnnnnnnnnnnnnnnnnnnnnnnnnnnnnnnnnnnnnnnnnnnnnnnnnnnnnnnnnnnnnnnnnnnnnnnnnnnnnnnnnnnnnnnnnnnnnnnnnnnnnnnnnnnnnnnnnnnnnnnnnnnnnnnnnnnnnnnnnnnnnnnnnnnnnnnnnnnnnnnnnnnnnnnnnnnnnnnnnnnnnnnnnnnnnnnnnnnnnnnnnnnnnnnnnnnnnnnnnnnnnnnnnnnnnnnnnnnnnnnnnnnnnnnnnnnnnnnnnnnnnnnnnnnnnnnnnnnnnnnnnnnnnnnnnnnnnnnnnnnnnnnnnnnnnnnnnnnnnnnnnnnnnnnnnnnnnnnnnnnnnnnnnnnnnnnnnnnnnnnnnnnnnnnnnnnnnnnnnnnnnnnnnnnnnnnnnnnnnnnnnnnnnnnnnnnnnnnnnnnnnnnnnnnnnnnnnnnnnnnnnnnnnnnnnnnnnnnnnnnnnnnnnnnnnnnnnnnnnnnnnnnnnnnnnnnnnnnnnnnnnnnnnnnnnnnnnnnnnnnnnnnnnnnnnnnnnnnnnnnnnnnnnnnnnnnnnnnnnnnnnnnnnnnnnnnnnnnnnnnnnnnnnnnnnnnnnnnnnnnnnnnnnnnnnnnnnnnnnnnnnnnnnnnnnnnnnnnnnnnnnnnnnnnnnnnnnnnnnnnnnnnnnnnnnnnnnnnnnnnnnnnnnnnnnnnnnnnnnnnnnnnnnnnnnnnnnnnnnnnnnnnnnnnnnnnnnnnnnnnnnnnnnnnnnnnnnnnnnnnnnnnnnnnnnnnnnnnnnnnnnnnnnnnnnnnnnnnnnnnnnnnnnnnnnnnnnnnnnnnnnnnnnnnnnnnnnnnnnnnnnnnnnnnnnnnnnnnnnnnnnnnnnnnnnnnnnnnnnnnnnnnnnnnnnnnnnnnnnnnnnnnnnnnnnnnnnnnnnnnnnnnnnnnnnnnnnnnnnnnnnnnnnnnnnnnnnnnnnnnnnnnnnnnnnnnnnnnnnnnnnnnnnnnnnnnnnnnnnnnnnnnnnnnnnnnnnnnnnnnnnnnnnnnnnnnnnnnnnnnnnnnnnnnnnnnnnnnnnnnnnnnnnnnnnnnnnnnnnnnnnnnnnnnnnnnnnnnnnnnnnnnnnnnnnnnnnnnnnnnnnnnnnnnnnnnnnnnnnnnnnnnnnnnnnnnnnnnnnnnnnnnnnnnnnnnnnnnnnnnnnnnnnnnnnnnnnnnnnnnnnnnnnnnnnnnnnnnnnnnnnnnnnnnnnnnnnnnnnnnnnnnnnnnnnnnnnnnnnnnnnnnnnnnnnnnnnnnnnnnnnnnnnnnnnnnnnnnnnnnnnnnnnnnnnnnnnnnnnnnnnnnnnnnnnnnnnnnnnnnnnnnnnnnnnnnnnnnnnnnnnnnnnnnnnnnnnnnnnnnnnnnnnnnnnnnnnnnnnnnnnnnnnnnnnnnnnnnnnnnnnnnnnnnnnnnnnnnnnnnnnnnnnnnnnnnnnnnnnnnnnnnnnnnnnnnnnnnnnnnnnnnnnnnnnnnnnnnnnnnnnnnnnnnnnnnnnnnnnnnnnnnnnnnnnnnnnnnnnnnnnnnnnnnnnnnnnnnnnnnnnnnnnnnnnnnnnnnnnnnnnnnnnnnnnnnnnnnnnnnnnnnnnnnnnnnnnnnnnnnnnnnnnnnnnnnnnnnnnnnnnnnnnnnnnnnnnnnnnnnnnnnnnnnnnnnnnnnnnnnnnnnnnnnnnnnnnnnnnnnnnnnnnnnnnnnnnnnnnnnnnnnnnnnnnnnnnnnnnnnnnnnnnnnnnnnnnnnnnnnnnnnnnnnnnnnnnnnnnnnnnnnnnnnnnnnnnnnnnnnnnnnnnnnnnnnnnnnnnnnnnnnnnnnnnnnnnnnnnnnnnnnnnnnnnnnnnnnnnnnnnnnnnnnnnnnnnnnnnnnnnnnnnnnnnnnnnnnnnnnnnnnnnnnnnnnnnnnnnnnnnnnnnnnnnnnnnnnnnnnnnnnnnnnnnnnnnnnnnnnnnnnnnnnnnnnnnnnnnnnnnnnnnnnnnnnnnnnnnnnnnnnnnnnnnnnnnnnnnnnnnnnnnnnnnnnnnnnnnnnnnnnnnnnnnnnnnnnnnnnnnnnnnnnnnnnnnnnnnnnnnnnnnnnnnnnnnnnnnnnnnnnnnnnnnnnnnnnnnnnnnnnnnnnnnnnnnnnnnnnnnnnnnnnnnnnnnnnnnnnnnnnnnnnnnnnnnnnnnnnnnnnnnnnnnnnnnnnnnnnnnnnnnnnnnnnnnnnnnnnnnnnnnnnnnnnnnnnnnnnnnnnnnnnnnnnnnnnnnnnnnnnnnnnnnnnnnnnnnnnnnnnnnnnnnnnnnnnnnnnnnnnnnnnnnnnnnnnnnnnnnnnnnnnnnnnnnnnnnnnnnnnnnnnnnnnnnnnnnnnnnnnnnnnnnnnnnnnnnnnnnnnnnnnnnnnnnnnnnnnnnnnnnnnnnnnnnnnnnnnnnnnnnnnnnnnnnnnnnnnnnnnnnnnnnnnnnnnnnnnnnnnnnnnnnnnnnnnnnnnnnnnnnnnnnnnnnnnnnnnnnnnnnnnnnnnnnnnnnnnnnnnnnnnnnnnnnnnnnnnnnnnnnnnnnnnnnnnnnnnnnnnnnnnnnnnnnnnnnnnnnnnnnnnnnnnnnnnnnnnnnnnnnnnnnnnnnnnnnnnnnnnnnnnnnnnnnnnnnnnnnnnnnnnnnnnnnnnnnnnnnnnnnnnnnnnnnnnnnnnnnnnnnnnnnnnnnnnnnnnnnnnnnnnnnnnnnnnnnnnnnnnnnnnnnnnnnnnnnnnnnnnnnnnnnnnnnnnnnnnnnnnnnnnnnnnnnnnnnnnnnnnnnnnnnnnnnnnnnnnnnnnnnnnnnnnnnnnnnnnnnnnnnnnnnnnnnnnnnnnnnnnnnnnnnnnnnnnnnnnnnnnnnnnnnnnnnnnnnnnnnnnnnnnnnnnnnnnnnnnnnnnnnnnnnnnnnnnnnnnnnnnnnnnnnnnnnnnnnnnnnnnnnnnnnnnnnnnnnnnnnnnnnnnnnnnnnnnnnnnnnnnnnnnnnnnnnnnnnnnnnnnnnnnnnnnnnnnnnnnnnnnnnnnnnnnnnnnnnnnnnnnnnnnnnnnnnnnnnnnnnnnnnnnnnnnnnnnnnnnnnnnnnnnnnnnnnnnnnnnnnnnnnnnnnnnnnnnnnnnnnnnnnnnnnnnnnnnnnnnnnnnnnnnnnnnnnnnnnnnnnnnnnnnnnnnnnnnnnnnnnnnnnnnnnnnnnnnnnnnnnnnnnnnnnnnnnnnnnnnnnnnnnnnnnnnnnnnnnnnnnnnnnnnnnnnnnnnnnnnnnnnnnnnnnnnnnnnnnnnnnnnnnnnnnnnnnnnnnnnnnnnnnnnnnnnnnnnnnnnnnnnnnnnnnnnnnnnnnnnnnnnnnnnnnnnnnnnnnnnnnnnnnnnnnnnnnnnnnnnnnnnnnnnnnnnnnnnnnnnnnnnnnnnnnnnnnnnnnnnnnnnnnnnnnnnnnnnnnnnnnnnnnnnnnnnnnnnnnnnnnnnnnnnnnnnnnnnnnnnnnnnnnnnnnnnnnnnnnnnnnnnnnnnnnnnnnnnnnnnnnnnnnnnnnnnnnnnnnnnnnnnnnnnnnnnnnnnnnnnnnnnnnnnnnnnnnnnnnnnnnnnnnnnnnnnnnnnnnnnnnnnnnnnnnnnnnnnnnnnnnnnnnnnnnnnnnnnnnnnnnnnnnnnnnnnnnnnnnnnnnnnnnnnnnnnnnnnnnnnnnnnnnnnnnnnnnnnnnnnnnnnnnnnnnnnnnnnnnnnnnnnnnnnnnnnnnnnnnnnnnnnnnnnnnnnnnnnnnnnnnnnnnnnnnnnnnnnnnnnnnnnnnnnnnnnnnnnnnnnnnnnnnnnnnnnnnnnnnnnnnnnnnnnnnnnnnnnnnnnnnnnnnnnnnnnnnnnnnnnnnnnnnnnnnnnnnnnnnnnnnnnnnnnnnnnnnnnnnnnnnnnnnnnnnnnnnnnnnnnnnnnnnnnnnnnnnnnnnnnnnnnnnnnnnnnnnnnnnnnnnnnnnnnnnnnnnnnnnnnnnnnnnnnnnnnnnnnnnnnnnnnnnnnnnnnnnnnnnnnnnnnnnnnnnnnnnnnnnnnnnnnnnnnnnnnnnnnnnnnnnnnnnnnnnnnnnnnnnnnnnnnnnnnnnnnnnnnnnnnnnnnnnnnnnnnnnnnnnnnnnnnnnnnnnnnnnnnnnnnnnnnnnnnnnnnnnnnnnnnnnnnnnnnnnnnnnnnnnnnnnnnnnnnnnnnnnnnnnnnnnnnnnnnnnnnnnnnnnnnnnnnnnnnnnnnnnnnnnnnnnnnnnnnnnnnnnnnnnnnnnnnnnnnnnnnnnnnnnnnnnnnnnnnnnnnnnnnnnnnnnnnnnnnnnnnnnnnnnnnnnnnnnnnnnnnnnnnnnnnnnnnnnnnnnnnnnnnnnnnnnnnnnnnnnnnnnnnnnnnnnnnnnnnnnnnnnnnnnnnnnnnnnnnnnnnnnnnnnnnnnnnnnnnnnnnnnnnnnnnnnnnnnnnnnnnnnnnnnnnnnnnnnnnnnnnnnnnnnnnnnnnnnnnnnnnnnnnnnnnnnnnnnnnnnnnnnnnnnnnnnnnnnnnnnnnnnnnnnnnnnnnnnnnnnnnnnnnnnnnnnnnnnnnnnnnnnnnnnnnnnnnnnnnnnnnnnnnnnnnnnnnnnnnnnnnnnnnnnnnnnnnnnnnnnnnnnnnnnnnnnnnnnnnnnnnnnnnnnnnnnnnnnnnnnnnnnnnnnnnnnnnnnnnnnnnnnnnnnnnnnnnnnnnnnnnnnnnnnnnnnnnnnnnnnnnnnnnnnnnnnnnnnnnnnnnnnnnnnnnnnnnnnnnnnnnnnnnnnnnnnnnnnnnnnnnnnnnnnnnnnnnnnnnnnnnnnnnnnnnnnnnnnnnnnnnnnnnnnnnnnnnnnnnnnnnnnnnnnnnnnnnnnnnnnnnnnnnnnnnnnnnnnnnnnnnnnnnnnnnnnnnnnnnnnnnnnnnnnnnnnnnnnnnnnnnnnnnnnnnnnnnnnnnnnnnnnnnnnnnnnnnnnnnnnnnnnnnnnnnnnnnnnnnnnnnnnnnnnnnnnnnnnnnnnnnnnnnnnnnnnnnnnnnnnnnnnnnnnnnnnnnnnnnnnnnnnnnnnnnnnnnnnnnnnnnnnnnnnnnnnnnnnnnnnnnnnnnnnnnnnnnnnnnnnnnnnnnnnnnnnnnnnnnnnnnnnnnnnnnnnnnnnnnnnnnnnnnnnnnnnnnnnnnnnnnnnnnnnnnnnnnnnnnnnnnnnnnnnnnnnnnnnnnnnnnnnnnnnnnnnnnnnnnnnnnnnnnnnnnnnnnnnnnnnnnnnnnnnnnnnnnnnnnnnnnnnnnnnnnnnnnnnnnnnnnnnnnnnnnnnnnnnnnnnnnnnnnnnnnnnnnnnnnnnnnnnnnnnnnnnnnnnnnnnnnnnnnnnnnnnnnnnnnnnnnnnnnnnnnnnnnnnnnnnnnnnnnnnnnnnnnnnnnnnnnnnnnnnnnnnnnnnnnnnnnnnnnnnnnnnnnnnnnnnnnnnnnnnnnnnnnnnnnnnnnnnnnnnnnnnnnnnnnnnnnnnnnnnnnnnnnnnnnnnnnnnnnnnnnnnnnnnnnnnnnnnnnnnnnnnnnnnnnnnnnnnnnnnnnnnnnnnnnnnnnnnnnnnnnnnnnnnnnnnnnnnnnnnnnnnnnnnnnnnnnnnnnnnnnnnnnnnnnnnnnnnnnnnnnnnnnnnnnnnnnnnnnnnnnnnnnnnnnnnnnnnnnnnnnnnnnnnnnnnnnnnnnnnnnnnnnnnnnnnnnnnnnnnnnnnnnnnnnnnnnnnnnnnnnnnnnnnnnnnnnnnnnnnnnnnnnnnnnnnnnnnnnnnnnnnnnnnnnnnnnnnnnnnnnnnnnnnnnnnnnnnnnnnnnnnnnnnnnnnnnnnnnnnnnnnnnnnnnnnnnnnnnnnnnnnnnnnnnnnnnnnnnnnnnnnnnnnnnnnnnnnnnnnnnnnnnnnnnnnnnnnnnnnnnnnnnnnnnnnnnnnnnnnnnnnnnnnnnnnnnnnnnnnnnnnnnnnnnnnnnnnnnnnnnnnnnnnnnnnnnnnnnnnnnnnnnnnnnnnnnnnnnnnnnnnnnnnnnnnnnnnnnnnnnnnnnnnnnnnnnnnnnnnnnnnnnnnnnnnnnnnnnnnnnnnnnnnnnnnnnnnnnnnnnnnnnnnnnnnnnnnnnnnnnnnnnnnnnnnnnnnnnnnnnnnnnnnnnnnnnnnnnnnnnnnnnnnnnnnnnnnnnnnnnnnnnnnnnnnnnnnnnnnnnnnnnnnnnnnnnnnnnnnnnnnnnnnnnnnnnnnnnnnnnnnnnnnnnnnnnnnnnnnnnnnnnnnnnnnnnnnnnnnnnnnnnnnnnnnnnnnnnnnnnnnnnnnnnnnnnnnnnnnnnnnnnnnnnnnnnnnnnnnnnnnnnnnnnnnnnnnnnnnnnnnnnnnnnnnnnnnnnnnnnnnnnnnnnnnnnnnnnnnnnnnnnnnnnnnnnnnnnnnnnnnnnnnnnnnnnnnnnnnnnnnnnnnnnnnnnnnnnnnnnnnnnnnnnnnnnnnnnnnnnnnnnnnnnnnnnnnnnnnnnnnnnnnnnnnnnnnnnnnnnnnnnnnnnnnnnnnnnnnnnnnnnnnnnnnnnnnnnnnnnnnnnnnnnnnnnnnnnnnnnnnnnnnnnnnnnnnnnnnnnnnnnnnnnnnnnnnnnnnnnnnnnnnnnnnnnnnnnnnnnnnnnnnnnnnnnnnnnnnnnnnnnnnnnnnnnnnnnnnnnnnnnnnnnnnnnnnnnnnnnnnnnnnnnnnnnnnnnnnnnnnnnnnnnnnnnnnnnnnnnnnnnnnnnnnnnnnnnnnnnnnnnnnnnnnnnnnnnnnnnnnnnnnnnnnnnnnnnnnnnnnnnnnnnnnnnnnnnnnnnnnnnnnnnnnnnnnnnnnnnnnnnnnnnnnnnnnnnnnnnnnnnnnnnnnnnnnnnnnnnnnnnnnnnnnnnnnnnnnnnnnnnnnnnnnnnnnnnnnnnnnnnnnnnnnnnnnnnnnnnnnnnnnnnnnnnnnnnnnnnnnnnnnnnnnnnnnnnnnnnnnnnnnnnnnnnnnnnnnnnnnnnnnnnnnnnnnnnnnnnnnnnnnnnnnnnnnnnnnnnnnnnnnnnnnnnnnnnnnnnnnnnnnnnnnnnnnnnnnnnnnnnnnnnnnnnnnnnnnnnnnnnnnnnnnnnnnnnnnnnnnnnnnnnnnnnnnnnnnnnnnnnnnnnnnnnnnnnnnnnnnnnnnnnnnnnnnnnnnnnnnnnnnnnnnnnnnnnnnnnnnnnnnnnnnnnnnnnnnnnnnnnnnnnnnnnnnnnnnnnnnnnnnnnnnnnnnnnnnnnnnnnnnnnnnnnnnnnnnnnnnnnnnnnnnnnnnnnnnnnnnnnnnnnnnnnnnnnnnnnnnnnnnnnnnnnnnnnnnnnnnnnnnnnnnnnnnnnnnnnnnnnnnnnnnnnnnnnnnnnnnnnnnnnnnnnnnnnnnnnnnnnnnnnnnnnnnnnnnnnnnnnnnnnnnnnnnnnnnnnnnnnnnnnnnnnnnnnnnnnnnnnnnnnnnnnnnnnnnnnnnnnnnnnnnnnnnnnnnnnnnnnnnnnnnnnnnnnnnnnnnnnnnnnnnnnnnnnnnnnnnnnnnnnnnnnnnnnnnnnnnnnnnnnnnnnnnnnnnnnnnnnnnnnnnnnnnnnnnnnnnnnnnnnnnnnnnnnnnnnnnnnnnnnnnnnnnnnnnnnnnnnnnnnnnnnnnnnnnnnnnnnnnnnnnnnnnnnnnnnnnnnnnnnnnnnnnnnnnnnnnnnnnnnnnnnnnnnnnnnnnnnnnnnnnnnnnnnnnnnnnnnnnnnnnnnnnnnnnnnnnnnnnnnnnnnnnnnnnnnnnnnnnnnnnnnnnnnnnnnnnnnnnnnnnnnnnnnnnnnnnnnnnnnnnnnnnnnnnnnnnnnnnnnnnnnnnnnnnnnnnnnnnnnnnnnnnnnnnnnnnnnnnnnnnnnnnnnnnnnnnnnnnnnnnnnnnnnnnnnnnnnnnnnnnnnnnnnnnnnnnnnnnnnnnnnnnnnnnnnnnnnnnnnnnnnnnnnnnnnnnnnnnnnnnnnnnnnnnnnnnnnnnnnnnnnnnnnnnnnnnnnnnnnnnnnnnnnnnnnnnnnnnnnnnnnnnnnnnnnnnnnnnnnnnnnnnnnnnnnnnnnnnnnnnnnnnnnnnnnnnnnnnnnnnnnnnnnnnnnnnnnnnnnnnnnnnnnnnnnnnnnnnnnnnnnnnnnnnnnnnnnnnnnnnnnnnnnnnnnnnnnnnnnnnnnnnnnnnnnnnnnnnnnnnnnnnnnnnnnnnnnnnnnnnnnnnnnnnnnnnnnnnnnnnnnnnnnnnnnnnnnnnnnnnnnnnnnnnnnnnnnnnnnnnnnnnnnnnnnnnnnnnnnnnnnnnnnnnnnnnnnnnnnnnnnnnnnnnnnnnnnnnnnnnnnnnnnnnnnnnnnnnnnnnnnnnnnnnnnnnnnnnnnnnnnnnnnnnnnnnnnnnnnnnnnnnnnnnnnnnnnnnnnnnnnnnnnnnnnnnnnnnnnnnnnnnnnnnnnnnnnnnnnnnnnnnnnnnnnnnnnnnnnnnnnnnnnnnnnnnnnnnnnnnnnnnnnnnnnnnnnnnnnnnnnnnnnnnnnnnnnnnnnnnnnnnnnnnnnnnnnnnnnnnnnnnnnnnnnnnnnnnnnnnnnnnnnnnnnnnnnnnnnnnnnnnnnnnnnnnnnnnnnnnnnnnnnnnnnnnnnnnnnnnnnnnnnnnnnnnnnnnnnnnnnnnnnnnnnnnnnnnnnnnnnnnnnnnnnnnnnnnnnnnnnnnnnnnnnnnnnnnnnnnnnnnnnnnnnnnnnnnnnnnnnnnnnnnnnnnnnnnnnnnnnnnnnnnnnnnnnnnnnnnnnnnnnnnnnnnnnnnnnnnnnnnnnnnnnnnnnnnnnnnnnnnnnnnnnnnnnnnnnnnnnnnnnnnnnnnnnnnnnnnnnnnnnnnnnnnnnnnnnnnnnnnnnnnnnnnnnnnnnnnnnnnnnnnnnnnnnnnnnnnnnnnnnnnnnnnnnnnnnnnnnnnnnnnnnnnnnnnnnnnnnnnnnnnnnnnnnnnnnnnnnnnnnnnnnnnnnnnnnnnnnnnnnnnnnnnnnnnnnnnnnnnnnnnnnnnnnnnnnnnnnnnnnnnnnnnnnnnnnnnnnnnnnnnnnnnnnnnnnnnnnnnnnnnnnnnnnnnnnnnnnnnnnnnnnnnnnnnnnnnnnnnnnnnnnnnnnnnnnnnnnnnnnnnnnnnnnnnnnnnnnnnnnnnnnnnnnnnnnnnnnnnnnnnnnnnnnnnnnnnnnnnnnnnnnnnnnnnnnnnnnnnnnnnnnnnnnnnnnnnnnnnnnnnnnnnnnnnnnnnnnnnnnnnnnnnnnnnnnnnnnnnnnnnnnnnnnnnnnnnnnnnnnnnnnnnnnnnnnnnnnnnnnnnnnnnnnnnnnnnnnnnnnnnnnnnnnnnnnnnnnnnnnnnnnnnnnnnnnnnnnnnnnnnnnnnnnnnnnnnnnnnnnnnnnnnnnnnnnnnnnnnnnnnnnnnnnnnnnnnnnnnnnnnnnnnnnnnnnnnnnnnnnnnnnnnnnnnnnnnnnnnnnnnnnnnnnnnnnnnnnnnnnnnnnnnnnnnnnnnnnnnnnnnnnnnnnnnnnnnnnnnnnnnnnnnnnnnnnnnnnnnnnnnnnnnnnnnnnnnnnnnnnnnnnnnnnnnnnnnnnnnnnnnnnnnnnnnnnnnnnnnnnnnnnnnnnnnnnnnnnnnnnnnnnnnnnnnnnnnnnnnnnnnnnnnnnnnnnnnnnnnnnnnnnnnnnnnnnnnnnnnnnnnnnnnnnnnnnnnnnnnnnnnnnnnnnnnnnnnnnnnnnnnnnnnnnnnnnnnnnnnnnnnnnnnnnnnnnnnnnnnnnnnnnnnnnnnnnnnnnnnnnnnnnnnnnnnnnnnnnnnnnnnnnnnnnnnnnnnnnnnnnnnnnnnnnnnnnnnnnnnnnnnnnnnnnnnnnnnnnnnnnnnnnnnnnnnnnnnnnnnnnnnnnnnnnnnnnnnnnnnnnnnnnnnnnnnnnnnnnnnnnnnnnnnnnnnnnnnnnnnnnnnnnnnnnnnnnnnnnnnnnnnnnnnnnnnnnnnnnnnnnnnnnnnnnnnnnnnnnnnnnnnnnnnnnnnnnnnnnnnnnnnnnnnnnnnnnnnnnnnnnnnnnnnnnnnnnnnnnnnnnnnnnnnnnnnnnnnnnnnnnnnnnnnnnnnnnnnnnnnnnnnnnnnnnnnnnnnnnnnnnnnnnnnnnnnnnnnnnnnnnnnnnnnnnnnnnnnnnnnnnnnnnnnnnnnnnnnnnnnnnnnnnnnnnnnnnnnnnnnnnnnnnnnnnnnnnnnnnnnnnnnnnnnnnnnnnnnnnnnnnnnnnnnnnnnnnnnnnnnnnnnnnnnnnnnnnnnnnnnnnnnnnnnnnnnnnnnnnnnnnnnnnnnnnnnnnnnnnnnnnnnnnnnnnnnnnnnnnnnnnnnnnnnnnnnnnnnnnnnnnnnnnnnnnnnnnnnnnnnnnnnnnnnnnnnnnnnnnnnnnnnnnnnnnnnnnnnnnnnnnnnnnnnnnnnnnnnnnnnnnnnnnnnnnnnnnnnnnnnnnnnnnnnnnnnnnnnnnnnnnnnnnnnnnnnnnnnnnnnnnnnnnnnnnnnnnnnnnnnnnnnnnnnnnnnnnnnnnnnnnnnnnnnnnnnnnnnnnnnnnnnnnnnnnnnnnnnnnnnnnnnnnnnnnnnnnnnnnnnnnnnnnnnnnnnnnnnnnnnnnnnnnnnnnnnnnnnnnnnnnnnnnnnnnnnnnnnnnnnnnnnnnnnnnnnnnnnnnnnnnnnnnnnnnnnnnnnnnnnnnnnnnnnnnnnnnnnnnnnnnnnnnnnnnnnnnnnnnnnnnnnnnnnnnnnnnnnnnnnnnnnnnnnnnnnnnnnnnnnnnnnnnnnnnnnnnnnnnnnnnnnnnnnnnnnnnnnnnnnnnnnnnnnnnnnnnnnnnnnnnnnnnnnnnnnnnnnnnnnnnnnnnnnnnnnnnnnnnnnnnnnnnnnnnnnnnnnnnnnnnnnnnnnnnnnnnnnnnnnnnnnnnnnnnnnnnnnnnnnnnnnnnnnnnnnnnnnnnnnnnnnnnnnnnnnnnnnnnnnnnnnnnnnnnnnnnnnnnnnnnnnnnnnnnnnnnnnnnnnnnnnnnnnnnnnnnnnnnnnnnnnnnnnnnnnnnnnnnnnnnnnnnnnnnnnnnnnnnnnnnnnnnnnnnnnnnnnnnnnnnnnnnnnnnnnnnnnnnnnnnnnnnnnnnnnnnnnnnnnnnnnnnnnnnnnnnnnnnnnnnnnnnnnnnnnnnnnnnnnnnnnnnnnnnnnnnnnnnnnnnnnnnnnnnnnnnnnnnnnnnnnnnnnnnnnnnnnnnnnnnnnnnnnnnnnnnnnnnnnnnnnnnnnnnnnnnnnnnnnnnnnnnnnnnnnnnnnnnnnnnnnnnnnnnnnnnnnnnnnnnnnnnnnnnnnnnnnnnnnnnnnnnnnnnnnnnnnnnnnnnnnnnnnnnnnnnnnnnnnnnnnnnnnnnnnnnnnnnnnnnnnnnnnnnnnnnnnnnnnnnnnnnnnnnnnnnnnnnnnnnnnnnnnnnnnnnnnnnnnnnnnnnnnnnnnnnnnnnnnnnnnnnnnnnnnnnnnnnnnnnnnnnnnnnnnnnnnnnnnnnnnnnnnnnnnnnnnnnnnnnnnnnnnnnnnnnnnnnnnnnnnnnnnnnnnnnnnnnnnnnnnnnnnnnnnnnnnnnnnnnnnnnnnnnnnnnnnnnnnnnnnnnnnnnnnnnnnnnnnnnnnnnnnnnnnnnnnnnnnnnnnnnnnnnnnnnnnnnnnnnnnnnnnnnnnnnnnnnnnnnnnnnnnnnnnnnnnnnnnnnnnnnnnnnnnnnnnnnnnnnnnnnnnnnnnnnnnnnnnnnnnnnnnnnnnnnnnnnnnnnnnnnnnnnnnnnnnnnnnnnnnnnnnnnnnnnnnnnnnnnnnnnnnnnnnnnnnnnnnnnnnnnnnnnnnnnnnnnnnnnnnnnnnnnnnnnnnnnnnnnnnnnnnnnnnnnnnnnnnnnnnnnnnnnnnnnnnnnnnnnnnnnnnnnnnnnnnnnnnnnnnnnnnnnnnnnnnnnnnnnnnnnnnnnnnnnnnnnnnnnnnnnnnnnnnnnnnnnnnnnnnnnnnnnnnnnnnnnnnnnnnnnnnnnnnnnnnnnnnnnnnnnnnnnnnnnnnnnnnnnnnnnnnnnnnnnnnnnnnnnnnnnnnnnnnnnnnnnnnnnnnnnnnnnnnnnnnnnnnnnnnnnnnnnnnnnnnnnnnnnnnnnnnnnnnnnnnnnnnnnnnnnnnnnnnnnnnnnnnnnnnnnnnnnnnnnnnnnnnnnnnnnnnnnnnnnnnnnnnnnnnnnnnnnnnnnnnnnnnnnnnnnnnnnnnnnnnnnnnnnnnnnnnnnnnnnnnnnnnnnnnnnnnnnnnnnnnnnnnnnnnnnnnnnnnnnnnnnnnnnnnnnnnnnnnnnnnnnnnnnnnnnnnnnnnnnnnnnnnnnnnnnnnnnnnnnnnnnnnnnnnnnnnnnnnnnnnnnnnnnnnnnnnnnnnnnnnnnnnnnnnnnnnnnnnnnnnnnnnnnnnnnnnnnnnnnnnnnnnnnnnnnnnnnnnnnnnnnnnnnnnnnnnnnnnnnnnnnnnnnnnnnnnnnnnnnnnnnnnnnnnnnnnnnnnnnnnnnnnnnnnnnnnnnnnnnnnnnnnnnnnnnnnnnnnnnnnnnnnnnnnnnnnnnnnnnnnnnnnnnnnnnnnnnnnnnnnnnnnnnnnnnnnnnnnnnnnnnnnnnnnnnnnnnnnnnnnnnnnnnnnnnnnnnnnnnnnnnnnnnnnnnnnnnnnnnnnnnnnnnnnnnnnnnnnnnnnnnnnnnnnnnnnnnnnnnnnnnnnnnnnnnnnnnnnnnnnnnnnnnnnnnnnnnnnnnnnnnnnnnnnnnnnnnnnnnnnnnnnnnnnnnnnnnnnnnnnnnnnnnnnnnnnnnnnnnnnnnnnnnnnnnnnnnnnnnnnnnnnnnnnnnnnnnnnnnnnnnnnnnnnnnnnnnnnnnnnnnnnnnnnnnnnnnnnnnnnnnnnnnnnnnnnnnnnnnnnnnnnnnnnnnnnnnnnnnnnnnnnnnnnnnnnnnnnnnnnnnnnnnnnnnnnnnnnnnnnnnnnnnnnnnnnnnnnnnnnnnnnnnnnnnnnnnnnnnnnnnnnnnnnnnnnnnnnnnnnnnnnnnnnnnnnnnnnnnnnnnnnnnnnnnnnnnnnnnnnnnnnnnnnnnnnnnnnnnnnnnnnnnnnnnnnnnnnnnnnnnnnnnnnnnnnnnnnnnnnnnnnnnnnnnnnnnnnnnnnnnnnnnnnnnnnnnnnnnnnnnnnnnnnnnnnnnnnnnnnnnnnnnnnnnnnnnnnnnnnnnnnnnnnnnnnnnnnnnnnnnnnnnnnnnnnnnnnnnnnnnnnnnnnnnnnnnnnnnnnnnnnnnnnnnnnnnnnnnnnnnnnnnnnnnnnnnnnnnnnnnnnnnnnnnnnnnnnnnnnnnnnnnnnnnnnnnnnnnnnnnnnnnnnnnnnnnnnnnnnnnnnnnnnnnnnnnnnnnnnnnnnnnnnnnnnnnnnnnnnnnnnnnnnnnnnnnnnnnnnnnnnnnnnnnnnnnnnnnnnnnnnnnnnnnnnnnnnnnnnnnnnnnnnnnnnnnnnnnnnnnnnnnnnnnnnnnnnnnnnnnnnnnnnnnnnnnnnnnnnnnnnnnnnnnnnnnnnnnnnnnnnnnnnnnnnnnnnnnnnnnnnnnnnnnnnnnnnnnnnnnnnnnnnnnnnnnnnnnnnnnnnnnnnnnnnnnnnnnnnnnnnnnnnnnnnnnnnnnnnnnnnnnnnnnnnnnnnnnnnnnnnnnnnnnnnnnnnnnnnnnnnnnnnnnnnnnnnnnnnnnnnnnnnnnnnnnnnnnnnnnnnnnnnnnnnnnnnnnnnnnnnnnnnnnnnnnnnnnnnnnnnnnnnnnnnnnnnnnnnnnnnnnnnnnnnnnnnnnnnnnnnnnnnnnnnnnnnnnnnnnnnnnnnnnnnnnnnnnnnnnnnnnnnnnnnnnnnnnnnnnnnnnnnnnnnnnnnnnnnnnnnnnnnnnnnnnnnnnnnnnnnnnnnnnnnnnnnnnnnnnnnnnnnnnnnnnnnnnnnnnnnnnnnnnnnnnnnnnnnnnnnnnnnnnnnnnnnnnnnnnnnnnnnnnnnnnnnnnnnnnnnnnnnnnnnnnnnnnnnnnnnnnnnnnnnnnnnnnnnnnnnnnnnnnnnnnnnnnnnnnnnnnnnnnnnnnnnnnnnnnnnnnnnnnnnnnnnnnnnnnnnnnnnnnnnnnnnnnnnnnnnnnnnnnnnnnnnnnnnnnnnnnnnnnnnnnnnnnnnnnnnnnnnnnnnnnnnnnnnnnnnnnnnnnnnnnnnnnnnnnnnnnnnnnnnnnnnnnnnnnnnnnnnnnnnnnnnnnnnnnnnnnnnnnnnnnnnnnnnnnnnnnnnnnnnnnnnnnnnnnnnnnnnnnnnnnnnnnnnnnnnnnnnnnnnnnnnnnnnnnnnnnnnnnnnnnnnnnnnnnnnnnnnnnnnnnnnnnnnnnnnnnnnnnnnnnnnnnnnnnnnnnnnnnnnnnnnnnnnnnnnnnnnnnnnnnnnnnnnnnnnnnnnnnnnnnnnnnnnnnnnnnnnnnnnnnnnnnnnnnnnnnnnnnnnnnnnnnnnnnnnnnnnnnnnnnnnnnnnnnnnnnnnnnnnnnnnnnnnnnnnnnnnnnnnnnnnnnnnnnnnnnnnnnnnnnnnnnnnnnnnnnnnnnnnnnnnnnnnnnnnnnnnnnnnnnnnnnnnnnnnnnnnnnnnnnnnnnnnnnnnnnnnnnnnnnnnnnnnnnnnnnnnnnnnnnnnnnnnnnnnnnnnnnnnnnnnnnnnnnnnnnnnnnnnnnnnnnnnnnnnnnnnnnnnnnnnnnnnnnnnnnnnnnnnnnnnnnnnnnnnnnnnnnnnnnnnnnnnnnnnnnnnnnnnnnnnnnnnnnnnnnnnnnnnnnnnnnnnnnnnnnnnnnnnnnnnnnnnnnnnnnnnnnnnnnnnnnnnnnnnnnnnnnnnnnnnnnnnnnnnnnnnnnnnnnnnnnnnnnnnnnnnnnnnnnnnnnnnnnnnnnnnnnnnnnnnnnnnnnnnnnnnnnnnnnnnnnnnnnnnnnnnnnnnnnnnnnnnnnnnnnnnnnnnnnnnnnnnnnnnnnnnnnnnnnnnnnnnnnnnnnnnnnnnnnnnnnnnnnnnnnnnnnnnnnnnnnnnnnnnnnnnnnnnnnnnnnnnnnnnnnnnnnnnnnnnnnnnnnnnnnnnnnnnnnnnnnnnnnnnnnnnnnnnnnnnnnnnnnnnnnnnnnnnnnnnnnnnnnnnnnnnnnnnnnnnnnnnnnnnnnnnnnnnnnnnnnnnnnnnnnnnnnnnnnnnnnnnnnnnnnnnnnnnnnnnnnnnnnnnnnnnnnnnnnnnnnnnnnnnnnnnnnnnnnnnnnnnnnnnnnnnnnnnnnnnnnnnnnnnnnnnnnnnnnnnnnnnnnnnnnnnnnnnnnnnnnnnnnnnnnnnnnnnnnnnnnnnnnnnnnnnnnnnnnnnnnnnnnnnnnnnnnnnnnnnnnnnnnnnnnnnnnnnnnnnnnnnnnnnnnnnnnnnnnnnnnnnnnnnnnnnnnnnnnnnnnnnnnnnnnnnnnnnnnnnnnnnnnnnnnnnnnnnnnnnnnnnnnnnnnnnnnnnnnnnnnnnnnnnnnnnnnnnnnnnnnnnnnnnnnnnnnnnnnnnnnnnnnnnnnnnnnnnnnnnnnnnnnnnnnnnnnnnnnnnnnnnnnnnnnnnnnnnnnnnnnnnnnnnnnnnnnnnnnnnnnnnnnnnnnnnnnnnnnnnnnnnnnnnnnnnnnnnnnnnnnnnnnnnnnnnnnnnnnnnnnnnnnnnnnnnnnnnnnnnnnnnnnnnnnnnnnnnnnnnnnnnnnnnnnnnnnnnnnnnnnnnnnnnnnnnnnnnnnnnnnnnnnnnnnnnnnnnnnnnnnnnnnnnnnnnnnnnnnnnnnnnnnnnnnnnnnnnnnnnnnnnnnnnnnnnnnnnnnnnnnnnnnnnnnnnnnnnnnnnnnnnnnnnnnnnnnnnnnnnnnnnnnnnnnnnnnnnnnnnnnnnnnnnnnnnnnnnnnnnnnnnnnnnnnnnnnnnnnnnnnnnnnnnnnnnnnnnnnnnnnnnnnnnnnnnnnnnnnnnnnnnnnnnnnnnnnnnnnnnnnnnnnnnnnnnnnnnnnnnnnnnnnnnnnnnnnnnnnnnnnnnnnnnnnnnnnnnnnnnnnnnnnnnnnnnnnnnnnnnnnnnnnnnnnnnnnnnnnnnnnnnnnnnnnnnnnnnnnnnnnnnnnnnnnnnnnnnnnnnnnnnnnnnnnnnnnnnnnnnnnnnnnnnnnnnnnnnnnnnnnnnnnnnnnnnnnnnnnnnnnnnnnnnnnnnnnnnnnnnnnnnnnnnnnnnnnnnnnnnnnnnnnnnnnnnnnnnnnnnnnnnnnnnnnnnnnnnnnnnnnnnnnnnnnnnnnnnnnnnnnnnnnnnnnnnnnnnnnnnnnnnnnnnnnnnnnnnnnnnnnnnnnnnnnnnnnnnnnnnnnnnnnnnnnnnnnnnnnnnnnnnnnnnnnnnnnnnnnnnnnnnnnnnnnnnnnnnnnnnnnnnnnnnnnnnnnnnnnnnnnnnnnnnnnnnnnnnnnnnnnnnnnnnnnnnnnnnnnnnnnnnnnnnnnnnnnnnnnnnnnnnnnnnnnnnnnnnnnnnnnnnnnnnnnnnnnnnnnnnnnnnnnnnnnnnnnnnnnnnnnnnnnnnnnnnnnnnnnnnnnnnnnnnnnnnnnnnnnnnnnnnnnnnnnnnnnnnnnnnnnnnnnnnnnnnnnnnnnnnnnnnnnnnnnnnnnnnnnnnnnnnnnnnnnnnnnnnnnnnnnnnnnnnnnnnnnnnnnnnnnnnnnnnnnnnnnnnnnnnnnnnnnnnnnnnnnnnnnnnnnnnnnnnnnnnnnnnnnnnnnnnnnnnnnnnnnnnnnnnnnnnnnnnnnnnnnnnnnnnnnnnnnnnnnnnnnnnnnnnnnnnnnnnnnnnnnnnnnnnnnnnnnnnnnnnnnnnnnnnnnnnnnnnnnnnnnnnnnnnnnnnnnnnnnnnnnnnnnnnnnnnnnnnnnnnnnnnnnnnnnnnnnnnnnnnnnnnnnnnnnnnnnnnnnnnnnnnnnnnnnnnnnnnnnnnnnnnnnnnnnnnnnnnnnnnnnnnnnnnnnnnnnnnnnnnnnnnnnnnnnnnnnnnnnnnnnnnnnnnnnnnnnnnnnnnnnnnnnnnnnnnnnnnnnnnnnnnnnnnnnnnnnnnnnnnnnnnnnnnnnnnnnnnnnnnnnnnnnnnnnnnnnnnnnnnnnnnnnnnnnnnnnnnnnnnnnnnnnnnnnnnnnnnnnnnnnnnnnnnnnnnnnnnnnnnnnnnnnnnnnnnnnnnnnnnnnnnnnnnnnnnnnnnnnnnnnnnnnnnnnnnnnnnnnnnnnnnnnnnnnnnnnnnnnnnnnnnnnnnnnnnnnnnnnnnnnnnnnnnnnnnnnnnnnnnnnnnnnnnnnnnnnnnnnnnnnnnnnnnnnnnnnnnnnnnnnnnnnnnnnnnnnnnnnnnnnnnnnnnnnnnnnnnnnnnnnnnnnnnnnnnnnnnnnnnnnnnnnnnnnnnnnnnnnnnnnnnnnnnnnnnnnnnnnnnnnnnnnnnnnnnnnnnnnnnnnnnnnnnnnnnnnnnnnnnnnnnnnnnnnnnnnnnnnnnnnnnnnnnnnnnnnnnnnnnnnnnnnnnnnnnnnnnnnnnnnnnnnnnnnnnnnnnnnnnnnnnnnnnnnnnnnnnnnnnnnnnnnnnnnnnnnnnnnnnnnnnnnnnnnnnnnnnnnnnnnnnnnnnnnnnnnnnnnnnnnnnnnnnnnnnnnnnnnnnnnnnnnnnnnnnnnnnnnnnnnnnnnnnnnnnnnnnnnnnnnnnnnnnnnnnnnnnnnnnnnnnnnnnnnnnnnnnnnnnnnnnnnnnnnnnnnnnnnnnnnnnnnnnnnnnnnnnnnnnnnnnnnnnnnnnnnnnnnnnnnnnnnnnnnnnnnnnnnnnnnnnnnnnnnnnnnnnnnnnnnnnnnnnnnnnnnnnnnnnnnnnnnnnnnnnnnnnnnnnnnnnnnnnnnnnnnnnnnnnnnnnnnnnnnnnnnnnnnnnnnnnnnnnnnnnnnnnnnnnnnnnnnnnnnnnnnnnnnnnnnnnnnnnnnnnnnnnnnnnnnnnnnnnnnnnnnnnnnnnnnnnnnnnnnnnnnnnnnnnnnnnnnnnnnnnnnnnnnnnnnnnnnnnnnnnnnnnnnnnnnnnnnnnnnnnnnnnnnnnnnnnnnnnnnnnnnnnnnnnnnnnnnnnnnnnnnnnnnnnnnnnnnnnnnnnnnnnnnnnnnnnnnnnnnnnnnnnnnnnnnnnnnnnnnnnnnnnnnnnnnnnnnnnnnnnnnnnnnnnnnnnnnnnnnnnnnnnnnnnnnnnnnnnnnnnnnnnnnnnnnnnnnnnnnnnnnnnnnnnnnnnnnnnnnnnnnnnnnnnnnnnnnnnnnnnnnnnnnnnnnnnnnnnnnnnnnnnnnnnnnnnnnnnnnnnnnnnnnnnnnnnnnnnnnnnnnnnnnnnnnnnnnnnnnnnnnnnnnnnnnnnnnnnnnnnnnnnnnnnnnnnnnnnnnnnnnnnnnnnnnnnnnnnnnnnnnnnnnnnnnnnnnnnnnnnnnnnnnnnnnnnnnnnnnnnnnnnnnnnnnnnnnnnnnnnnnnnnnnnnnnnnnnnnnnnnnnnnnnnnnnnnnnnnnnnnnnnnnnnnnnnnnnnnnnnnnnnnnnnnnnnnnnnnnnnnnnnnnnnnnnnnnnnnnnnnnnnnnnnnnnnnnnnnnnnnnnnnnnnnnnnnnnnnnnnnnnnnnnnnnnnnnnnnnnnnnnnnnnnnnnnnnnnnnnnnnnnnnnnnnnnnnnnnnnnnnnnnnnnnnnnnnnnnnnnnnnnnnnnnnnnnnnnnnnnnnnnnnnnnnnnnnnnnnnnnnnnnnnnnnnnnnnnnnnnnnnnnnnnnnnnnnnnnnnnnnnnnnnnnnnnnnnnnnnnnnnnnnnnnnnnnnnnnnnnnnnnnnnnnnnnnnnnnnnnnnnnnnnnnnnnnnnnnnnnnnnnnnnnnnnnnnnnnnnnnnnnnnnnnnnnnnnnnnnnnnnnnnnnnnnnnnnnnnnnnnnnnnnnnnnnnnnnnnnnnnnnnnnnnnnnnnnnnnnnnnnnnnnnnnnnnnnnnnnnnnnnnnnnnnnnnnnnnnnnnnnnnnnnnnnnnnnnnnnnnnnnnnnnnnnnnnnnnnnnnnnnnnnnnnnnnnnnnnnnnnnnnnnnnnnnnnnnnnnnnnnnnnnnnnnnnnnnnnnnnnnnnnnnnnnnnnnnnnnnnnnnnnnnnnnnnnnnnnnnnnnnnnnnnnnnnnnnnnnnnnnnnnnnnnnnnnnnnnnnnnnnnnnnnnnnnnnnnnnnnnnnnnnnnnnnnnnnnnnnnnnnnnnnnnnnnnnnnnnnnnnnnnnnnnnnnnnnnnnnnnnnnnnnnnnnnnnnnnnnnnnnnnnnnnnnnnnnnnnnnnnnnnnnnnnnnnnnnnnnnnnnnnnnnnnnnnnnnnnnnnnnnnnnnnnnnnnnnnnnnnnnnnnnnnnnnnnnnnnnnnnnnnnnnnnnnnnnnnnnnnnnnnnnnnnnnnnnnnnnnnnnnnnnnnnnnnnnnnnnnnnnnnnnnnnnnnnnnnnnnnnnnnnnnnnnnnnnnnnnnnnnnnnnnnnnnnnnnnnnnnnnnnnnnnnnnnnnnnnnnnnnnnnnnnnnnnnnnnnnnnnnnnnnnnnnnnnnnnnnnnnnnnnnnnnnnnnnnnnnnnnnnnnnnnnnnnnnnnnnnnnnnnnnnnnnnnnnnnnnnnnnnnnnnnnnnnnnnnnnnnnnnnnnnnnnnnnnnnnnnnnnnnnnnnnnnnnnnnnnnnnnnnnnnnnnnnnnnnnnnnnnnnnnnnnnnnnnnnnnnnnnnnnnnnnnnnnnnnnnnnnnnnnnnnnnnnnnnnnnnnnnnnnnnnnnnnnnnnnnnnnnnnnnnnnnnnnnnnnnnnnnnnnnnnnnnnnnnnnnnnnnnnnnnnnnnnnnnnnnnnnnnnnnnnnnnnnnnnnnnnnnnnnnnnnnnnnnnnnnnnnnnnnnnnnnnnnnnnnnnnnnnnnnnnnnnnnnnnnnnnnnnnnnnnnnnnnnnnnnnnnnnnnnnnnnnnnnnnnnnnnnnnnnnnnnnnnnnnnnnnnnnnnnnnnnnnnnnnnnnnnnnnnnnnnnnnnnnnnnnnnnnnnnnnnnnnnnnnnnnnnnnnnnnnnnnnnnnnnnnnnnnnnnnnnnnnnnnnnnnnnnnnnnnnnnnnnnnnnnnnnnnnnnnnnnnnnnnnnnnnnnnnnnnnnnnnnnnnnnnnnnnnnnnnnnnnnnnnnnnnnnnnnnnnnnnnnnnnnnnnnnnnnnnnnnnnnnnnnnnnnnnnnnnnnnnnnnnnnnnnnnnnnnnnnnnnnnnnnnnnnnnnnnnnnnnnnnnnnnnnnnnnnnnnnnnnnnnnnnnnnnnnnnnnnnnnnnnnnnnnnnnnnnnnnnnnnnnnnnnnnnnnnnnnnnnnnnnnnnnnnnnnnnnnnnnnnnnnnnnnnnnnnnnnnnnnnnnnnnnnnnnnnnnnnnnnnnnnnnnnnnnnnnnnnnnnnnnnnnnnnnnnnnnnnnnnnnnnnnnnnnnnnnnnnnnnnnnnnnnnnnnnnnnnnnnnnnnnnnnnnnnnnnnnnnnnnnnnnnnnnnnnnnnnnnnnnnnnnnnnnnnnnnnnnnnnnnnnnnnnnnnnnnnnnnnnnnnnnnnnnnnnnnnnnnnnnnnnnnnnnnnnnnnnnnnnnnnnnnnnnnnnnnnnnnnnnnnnnnnnnnnnnnnnnnnnnnnnnnnnnnnnnnnnnnnnnnnnnnnnnnnnnnnnnnnnnnnnnnnnnnnnnnnnnnnnnnnnnnnnnnnnnnnnnnnnnnnnnnnnnnnnnnnnnnnnnnnnnnnnnnnnnnnnnnnnnnnnnnnnnnnnnnnnnnnnnnnnnnnnnnnnnnnnnnnnnnnnnnnnnnnnnnnnnnnnnnnnnnnnnnnnnnnnnnnnnnnnnnnnnnnnnnnnnnnnnnnnnnnnnnnnnnnnnnnnnnnnnnnnnnnnnnnnnnnnnnnnnnnnnnnnnnnnnnnnnnnnnnnnnnnnnnnnnnnnnnnnnnnnnnnnnnnnnnnnnnnnnnnnnnnnnnnnnnnnnnnnnnnnnnnnnnnnnnnnnnnnnnnnnnnnnnnnnnnnnnnnnnnnnnnnnnnnnnnnnnnnnnnnnnnnnnnnnnnnnnnnnnnnnnnnnnnnnnnnnnnnnnnnnnnnnnnnnnnnnnnnnnnnnnnnnnnnnnnnnnnnnnnnnnnnnnnnnnnnnnnnnnnnnnnnnnnnnnnnnnnnnnnnnnnnnnnnnnnnnnnnnnnnnnnnnnnnnnnnnnnnnnnnnnnnnnnnnnnnnnnnnnnnnnnnnnnnnnnnnnnnnnnnnnnnnnnnnnnnnnnnnnnnnnnnnnnnnnnnnnnnnnnnnnnnnnnnnnnnnnnnnnnnnnnnnnnnnnnnnnnnnnnnnnnnnnnnnnnnnnnnnnnnnnnnnnnnnnnnnnnnnnnnnnnnnnnnnnnnnnnnnnnnnnnnnnnnnnnnnnnnnnnnnnnnnnnnnnnnnnnnnnnnnnnnnnnnnnnnnnnnnnnnnnnnnnnnnnnnnnnnnnnnnnnnnnnnnnnnnnnnnnnnnnnnnnnnnnnnnnnnnnnnnnnnnnnnnnnnnnnnnnnnnnnnnnnnnnnnnnnnnnnnnnnnnnnnnnnnnnnnnnnnnnnnnnnnnnnnnnnnnnnnnnnnnnnnnnnnnnnnnnnnnnnnnnnnnnnnnnnnnnnnnnnnnnnnnnnnnnnnnnnnnnnnnnnnnnnnnnnnnnnnnnnnnnnnnnnnnnnnnnnnnnnnnnnnnnnnnnnnnnnnnnnnnnnnnnnnnnnnnnnnnnnnnnnnnnnnnnnnnnnnnnnnnnnnnnnnnnnnnnnnnnnnnnnnnnnnnnnnnnnnnnnnnnnnnnnnnnnnnnnnnnnnnnnnnnnnnnnnnnnnnnnnnnnnnnnnnnnnnnnnnnnnnnnnnnnnnnnnnnnnnnnnnnnnnnnnnnnnnnnnnnnnnnnnnnnnnnnnnnnnnnnnnnnnnnnnnnnnnnnnnnnnnnnnnnnnnnnnnnnnnnnnnnnnnnnnnnnnnnnnnnnnnnnnnnnnnnnnnnnnnnnnnnnnnnnnnnnnnnnnnnnnnnnnnnnnnnnnnnnnnnnnnnnnnnnnnnnnnnnnnnnnnnnnnnnnnnnnnnnnnnnnnnnnnnnnnnnnnnnnnnnnnnnnnnnnnnnnnnnnnnnnnnnnnnnnnnnnnnnnnnnnnnnnnnnnnnnnnnnnnnnnnnnnnnnnnnnnnnnnnnnnnnnnnnnnnnnnnnnnnnnnnnnnnnnnnnnnnnnnnnnnnnnnnnnnnnnnnnnnnnnnnnnnnnnnnnnnnnnnnnnnnnnnnnnnnnnnnnnnnnnnnnnnnnnnnnnnnnnnnnnnnnnnnnnnnnnnnnnnnnnnnnnnnnnnnnnnnnnnnnnnnnnnnnnnnnnnnnnnnnnnnnnnnnnnnnnnnnnnnnnnnnnnnnnnnnnnnnnnnnnnnnnnnnnnnnnnnnnnnnnnnnnnnnnnnnnnnnnnnnnnnnnnnnnnnnnnnnnnnnnnnnnnnnnnnnnnnnnnnnnnnnnnnnnnnnnnnnnnnnnnnnnnnnnnnnnnnnnnnnnnnnnnnnnnnnnnnnnnnnnnnnnnnnnnnnnnnnnnnnnnnnnnnnnnnnnnnnnnnnnnnnnnnnnnnnnnnnnnnnnnnnnnnnnnnnnnnnnnnnnnnnnnnnnnnnnnnnnnnnnnnnnnnnnnnnnnnnnnnnnnnnnnnnnnnnnnnnnnnnnnnnnnnnnnnnnnnnnnnnnnnnnnnnnnnnnnnnnnnnnnnnnnnnnnnnnnnnnnnnnnnnnnnnnnnnnnnnnnnnnnnnnnnnnnnnnnnnnnnnnnnnnnnnnnnnnnnnnnnnnnnnnnnnnnnnnnnnnnnnnnnnnnnnnnnnnnnnnnnnnnnnnnnnnnnnnnnnnnnnnnnnnnnnnnnnnnnnnnnnnnnnnnnnnnnnnnnnnnnnnnnnnnnnnnnnnnnnnnnnnnnnnnnnnnnnnnnnnnnnnnnnnnnnnnnnnnnnnnnnnnnnnnnnnnnnnnnnnnnnnnnnnnnnnnnnnnnnnnnnnnnnnnnnnnnnnnnnnnnnnnnnnnnnnnnnnnnnnnnnnnnnnnnnnnnnnnnnnnnnnnnnnnnnnnnnnnnnnnnnnnnnnnnnnnnnnnnnnnnnnnnnnnnnnnnnnnnnnnnnnnnnnnnnnnnnnnnnnnnnnnnnnnnnnnnnnnnnnnnnnnnnnnnnnnnnnnnnnnnnnnnnnnnnnnnnnnnnnnnnnnnnnnnnnnnnnnnnnnnnnnnnnnnnnnnnnnnnnnnnnnnnnnnnnnnnnnnnnnnnnnnnnnnnnnnnnnnnnnnnnnnnnnnnnnnnnnnnnnnnnnnnnnnnnnnnnnnnnnnnnnnnnnnnnnnnnnnnnnnnnnnnnnnnnnnnnnnnnnnnnnnnnnnnnnnnnnnnnnnnnnnnnnnnnnnnnnnnnnnnnnnnnnnnnnnnnnnnnnnnnnnnnnnnnnnnnnnnnnnnnnnnnnnnnnnnnnnnnnnnnnnnnnnnnnnnnnnnnnnnnnnnnnnnnnnnnnnnnnnnnnnnnnnnnnnnnnnnnnnnnnnnnnnnnnnnnnnnnnnnnnnnnnnnnnnnnnnnnnnnnnnnnnnnnnnnnnnnnnnnnnnnnnnnnnnnnnnnnnnnnnnnnnnnnnnnnnnnnnnnnnnnnnnnnnnnnnnnnnnnnnnnnnnnnnnnnnnnnnnnnnnnnnnnnnnnnnnnnnnnnnnnnnnnnnnnnnnnnnnnnnnnnnnnnnnnnnnnnnnnnnnnnnnnnnnnnnnnnnnnnnnnnnnnnnnnnnnnnnnnnnnnnnnnnnnnnnnnnnnnnnnnnnnnnnnnnnnnnnnnnnnnnnnnnnnnnnnnnnnnnnnnnnnnnnnnnnnnnnnnnnnnnnnnnnnnnnnnnnnnnnnnnnnnnnnnnnnnnnnnnnnnnnnnnnnnnnnnnnnnnnnnnnnnnnnnnnnnnnnnnnnnnnnnnnnnnnnnnnnnnnnnnnnnnnnnnnnnnnnnnnnnnnnnnnnnnnnnnnnnnnnnnnnnnnnnnnnnnnnnnnnnnnnnnnnnnnnnnnnnnnnnnnnnnnnnnnnnnnnnnnnnnnnnnnnnnnnnnnnnnnnnnnnnnnnnnnnnnnnnnnnnnnnnnnnnnnnnnnnnnnnnnnnnnnnnnnnnnnnnnnnnnnnnnnnnnnnnnnnnnnnnnnnnnnnnnnnnnnnnnnnnnnnnnnnnnnnnnnnnnnnnnnnnnnnnnnnnnnnnnnnnnnnnnnnnnnnnnnnnnnnnnnnnnnnnnnnnnnnnnnnnnnnnnnnnnnnnnnnnnnnnnnnnnnnnnnnnnnnnnnnnnnnnnnnnnnnnnnnnnnnnnnnnnnnnnnnnnnnnnnnnnnnnnnnnnnnnnnnnnnnnnnnnnnnnnnnnnnnnnnnnnnnnnnnnnnnnnnnnnnnnnnnnnnnnnnnnnnnnnnnnnnnnnnnnnnnnnnnnnnnnnnnnnnnnnnnnnnnnnnnnnnnnnnnnnnnnnnnnnnnnnnnnnnnnnnnnnnnnnnnnnnnnnnnnnnnnnnnnnnnnnnnnnnnnnnnnnnnnnnnnnnnnnnnnnnnnnnnnnnnnnnnnnnnnnnnnnnnnnnnnnnnnnnnnnnnnnnnnnnnnnnnnnnnnnnnnnnnnnnnnnnnnnnnnnnnnnnnnnnnnnnnnnnnnnnnnnnnnnnnnnnnnnnnnnnnnnnnnnnnnnnnnnnnnnnnnnnnnnnnnnnnnnnnnnnnnnnnnnnnnnnnnnnnnnnnnnnnnnnnnnnnnnnnnnnnnnnnnnnnnnnnnnnnnnnnnnnnnnnnnnnnnnnnnnnnnnnnnnnnnnnnnnnnnnnnnnnnnnnnnnnnnnnnnnnnnnnnnnnnnnnnnnnnnnnnnnnnnnnnnnnnnnnnnnnnnnnnnnnnnnnnnnnnnnnnnnnnnnnnnnnnnnnnnnnnnnnnnnnnnnnnnnnnnnnnnnnnnnnnnnnnnnnnnnnnnnnnnnnnnnnnnnnnnnnnnnnnnnnnnnnnnnnnnnnnnnnnnnnnnnnnnnnnnnnnnnnnnnnnnnnnnnnnnnnnnnnnnnnnnnnnnnnnnnnnnnnnnnnnnnnnnnnnnnnnnnnnnnnnnnnnnnnnnnnnnnnnnnnnnnnnnnnnnnnnnnnnnnnnnnnnnnnnnnnnnnnnnnnnnnnnnnnnnnnnnnnnnnnnnnnnnnnnnnnnnnnnnnnnnnnnnnnnnnnnnnnnnnnnnnnnnnnnnnnnnnnnnnnnnnnnnnnnnnnnnnnnnnnnnnnnnnnnnnnnnnnnnnnnnnnnnnnnnnnnnnnnnnnnnnnnnnnnnnnnnnnnnnnnnnnnnnnnnnnnnnnnnnnnnnnnnnnnnnnnnnnnnnnnnnnnnnnnnnnnnnnnnnnnnnnnnnnnnnnnnnnnnnnnnnnnnnnnnnnnnnnnnnnnnnnnnnnnnnnnnnnnnnnnnnnnnnnnnnnnnnnnnnnnnnnnnnnnnnnnnnnnnnnnnnnnnnnnnnnnnnnnnnnnnnnnnnnnnnnnnnnnnnnnnnnnnnnnnnnnnnnnnnnnnnnnnnnnnnnnnnnnnnnnnnnnnnnnnnnnnnnnnnnnnnnnnnnnnnnnnnnnnnnnnnnnnnnnnnnnnnnnnnnnnnnnnnnnnnnnnnnnnnnnnnnnnnnnnnnnnnnnnnnnnnnnnnnnnnnnnnnnnnnnnnnnnnnnnnnnnnnnnnnnnnnnnnnnnnnnnnnnnnnnnnnnnnnnnnnnnnnnnnnnnnnnnnnnnnnnnnnnnnnnnnnnnnnnnnnnnnnnnnnnnnnnnnnnnnnnnnnnnnnnnnnnnnnnnnnnnnnnnnnnnnnnnnnnnnnnnnnnnnnnnnnnnnnnnnnnnnnnnnnnnnnnnnnnnnnnnnnnnnnnnnnnnnnnnnnnnnnnnnnnnnnnnnnnnnnnnnnnnnnnnnnnnnnnnnnnnnnnnnnnnnnnnnnnnnnnnnnnnnnnnnnnnnnnnnnnnnnnnnnnnnnnnnnnnnnnnnnnnnnnnnnnnnnnnnnnnnnnnnnnnnnnnnnnnnnnnnnnnnnnnnnnnnnnnnnnnnnnnnnnnnnnnnnnnnnnnnnnnnnnnnnnnnnnnnnnnnnnnnnnnnnnnnnnnnnnnnnnnnnnnnnnnnnnnnnnnnnnnnnnnnnnnnnnnnnnnnnnnnnnnnnnnnnnnnnnnnnnnnnnnnnnnnnnnnnnnnnnnnnnnnnnnnnnnnnnnnnnnnnnnnnnnnnnnnnnnnnnnnnnnnnnnnnnnnnnnnnnnnnnnnnnnnnnnnnnnnnnnnnnnnnnnnnnnnnnnnnnnnnnnnnnnnnnnnnnnnnnnnnnnnnnnnnnnnnnnnnnnnnnnnnnnnnnnnnnnnnnnnnnnnnnnnnnnnnnnnnnnnnnnnnnnnnnnnnnnnnnnnnnnnnnnnnnnnnnnnnnnnnnnnnnnnnnnnnnnnnnnnnnnnnnnnnnnnnnnnnnnnnnnnnnnnnnnnnnnnnnnnnnnnnnnnnnnnnnnnnnnnnnnnnnnnnnnnnnnnnnnnnnnnnnnnnnnnnnnnnnnnnnnnnnnnnnnnnnnnnnnnnnnnnnnnnnnnnnnnnnnnnnnnnnnnnnnnnnnnnnnnnnnnnnnnnnnnnnnnnnnnnnnnnnnnnnnnnnnnnnnnnnnnnnnnnnnnnnnnnnnnnnnnnnnnnnnnnnnnnnnnnnnnnnnnnnnnnnnnnnnnnnnnnnnnnnnnnnnnnnnnnnnnnnnnnnnnnnnnnnnnnnnnnnnnnnnnnnnnnnnnnnnnnnnnnnnnnnnnnnnnnnnnnnnnnnnnnnnnnnnnnnnnnnnnnnnnnnnnnnnnnnnnnnnnnnnnnnnnnnnnnnnnnnnnnnnnnnnnnnnnnnnnnnnnnnnnnnnnnnnnnnnnnnnnnnnnnnnnnnnnnnnnnnnnnnnnnnnnnnnnnnnnnnnnnnnnnnnnnnnnnnnnnnnnnnnnnnnnnnnnnnnnnnnnnnnnnnnnnnnnnnnnnnnnnnnnnnnnnnnnnnnnnnnnnnnnnnnnnnnnnnnnnnnnnnnnnnnnnnnnnnnnnnnnnnnnnnnnnnnnnnnnnnnnnnnnnnnnnnnnnnnnnnnnnnnnnnnnnnnnnnnnnnnnnnnnnnnnnnnnnnnnnnnnnnnnnnnnnnnnnnnnnnnnnnnnnnnnnnnnnnnnnnnnnnnnnnnnnnnnnnnnnnnnnnnnnnnnnnnnnnnnnnnnnnnnnnnnnnnnnnnnnnnnnnnnnnnnnnnnnnnnnnnnnnnnnnnnnnnnnnnnnnnnnnnnnnnnnnnnnnnnnnnnnnnnnnnnnnnnnnnnnnnnnnnnnnnnnnnnnnnnnnnnnnnnnnnnnnnnnnnnnnnnnnnnnnnnnnnnnnnnnnnnnnnnnnnnnnnnnnnnnnnnnnnnnnnnnnnnnnnnnnnnnnnnnnnnnnnnnnnnnnnnnnnnnnnnnnnnnnnnnnnnnnnnnnnnnnnnnnnnnnnnnnnnnnnnnnnnnnnnnnnnnnnnnnnnnnnnnnnnnnnnnnnnnnnnnnnnnnnnnnnnnnnnnnnnnnnnnnnnnnnnnnnnnnnnnnnnnnnnnnnnnnnnnnnnnnnnnnnnnnnnnnnnnnnnnnnnnnnnnnnnnnnnnnnnnnnnnnnnnnnnnnnnnnnnnnnnnnnnnnnnnnnnnnnnnnnnnnnnnnnnnnnnnnnnnnnnnnnnnnnnnnnnnnnnnnnnnnnnnnnnnnnnnnnnnnnnnnnnnnnnnnnnnnnnnnnnnnnnnnnnnnnnnnnnnnnnnnnnnnnnnnnnnnnnnnnnnnnnnnnnnnnnnnnnnnnnnnnnnnnnnnnnnnnnnnnnnnnnnnnnnnnnnnnnnnnnnnnnnnnnnnnnnnnnnnnnnnnnnnnnnnnnnnnnnnnnnnnnnnnnnnnnnnnnnnnnnnnnnnnnnnnnnnnnnnnnnnnnnnnnnnnnnnnnnnnnnnnnnnnnnnnnnnnnnnnnnnnnnnnnnnnnnnnnnnnnnnnnnnnnnnnnnnnnnnnnnnnnnnnnnnnnnnnnnnnnnnnnnnnnnnnnnnnnnnnnnnnnnnnnnnnnnnnnnnnnnnnnnnnnnnnnnnnnnnnnnnnnnnnnnnnnnnnnnnnnnnnnnnnnnnnnnnnnnnnnnnnnnnnnnnnnnnnnnnnnnnnnnnnnnnnnnnnnnnnnnnnnnnnnnnnnnnnnnnnnnnnnnnnnnnnnnnnnnnnnnnnnnnnnnnnnnnnnnnnnnnnnnnnnnnnnnnnnnnnnnnnnnnnnnnnnnnnnnnnnnnnnnnnnnnnnnnnnnnnnnnnnnnnnnnnnnnnnnnnnnnnnnnnnnnnnnnnnnnnnnnnnnnnnnnnnnnnnnnnnnnnnnnnnnnnnnnnnnnnnnnnnnnnnnnnnnnnnnnnnnnnnnnnnnnnnnnnnnnnnnnnnnnnnnnnnnnnnnnnnnnnnnnnnnnnnnnnnnnnnnnnnnnnnnnnnnnnnnnnnnnnnnnnnnnnnnnnnnnnnnnnnnnnnnnnnnnnnnnnnnnnnnnnnnnnnnnnnnnnnnnnnnnnnnnnnnnnnnnnnnnnnnnnnnnnnnnnnnnnnnnnnnnnnnnnnnnnnnnnnnnnnnnnnnnnnnnnnnnnnnnnnnnnnnnnnnnnnnnnnnnnnnnnnnnnnnnnnnnnnnnnnnnnnnnnnnnnnnnnnnnnnnnnnnnnnnnnnnnnnnnnnnnnnnnnnnnnnnnnnnnnnnnnnnnnnnnnnnnnnnnnnnnnnnnnnnnnnnnnnnnnnnnnnnnnnnnnnnnnnnnnnnnnnnnnnnnnnnnnnnnnnnnnnnnnnnnnnnnnnnnnnnnnnnnnnnnnnnnnnnnnnnnnnnnnnnnnnnnnnnnnnnnnnnnnnnnnnnnnnnnnnnnnnnnnnnnnnnnnnnnnnnnnnnnnnnnnnnnnnnnnnnnnnnnnnnnnnnnnnnnnnnnnnnnnnnnnnnnnnnnnnnnnnnnnnnnnnnnnnnnnnnnnnnnnnnnnnnnnnnnnnnnnnnnnnnnnnnnnnnnnnnnnnnnnnnnnnnnnnnnnnnnnnnnnnnnnnnnnnnnnnnnnnnnnnnnnnnnnnnnnnnnnnnnnnnnnnnnnnnnnnnnnnnnnnnnnnnnnnnnnnnnnnnnnnnnnnnnnnnnnnnnnnnnnnnnnnnnnnnnnnnnnnnnnnnnnnnnnnnnnnnnnnnnnnnnnnnnnnnnnnnnnnnnnnnnnnnnnnnnnnnnnnnnnnnnnnnnnnnnnnnnnnnnnnnnnnnnnnnnnnnnnnnnnnnnnnnnnnnnnnnnnnnnnnnnnnnnnnnnnnnnnnnnnnnnnnnnnnnnnnnnnnnnnnnnnnnnnnnnnnnnnnnnnnnnnnnnnnnnnnnnnnnnnnnnnnnnnnnnnnnnnnnnnnnnnnnnnnnnnnnnnnnnnnnnnnnnnnnnnnnnnnnnnnnnnnnnnnnnnnnnnnnnnnnnnnnnnnnnnnnnnnnnnnnnnnnnnnnnnnnnnnnnnnnnnnnnnnnnnnnnnnnnnnnnnnnnnnnnnnnnnnnnnnnnnnnnnnnnnnnnnnnnnnnnnnnnnnnnnnnnnnnnnnnnnnnnnnnnnnnnnnnnnnnnnnnnnnnnnnnnnnnnnnnnnnnnnnnnnnnnnnnnnnnnnnnnnnnnnnnnnnnnnnnnnnnnnnnnnnnnnnnnnnnnnnnnnnnnnnnnnnnnnnnnnnnnnnnnnnnnnnnnnnnnnnnnnnnnnnnnnnnnnnnnnnnnnnnnnnnnnnnnnnnnnnnnnnnnnnnnnnnnnnnnnnnnnnnnnnnnnnnnnnnnnnnnnnnnnnnnnnnnnnnnnnnnnnnnnnnnnnnnnnnnnnnnnnnnnnnnnnnnnnnnnnnnnnnnnnnnnnnnnnnnnnnnnnnnnnnnnnnnnnnnnnnnnnnnnnnnnnnnnnnnnnnnnnnnnnnnnnnnnnnnnnnnnnnnnnnnnnnnnnnnnnnnnnnnnnnnnnnnnnnnnnnnnnnnnnnnnnnnnnnnnnnnnnnnnnnnnnnnnnnnnnnnnnnnnnnnnnnnnnnnnnnnnnnnnnnnnnnnnnnnnnnnnnnnnnnnnnnnnnnnnnnnnnnnnnnnnnnnnnnnnnnnnnnnnnnnnnnnnnnnnnnnnnnnnnnnnnnnnnnnnnnnnnnnnnnnnnnnnnnnnnnnnnnnnnnnnnnnnnnnnnnnnnnnnnnnnnnnnnnnnnnnnnnnnnnnnnnnnnnnnnnnnnnnnnnnnnnnnnnnnnnnnnnnnnnnnnnnnnnnnnnnnnnnnnnnnnnnnnnnnnnnnnnnnnnnnnnnnnnnnnnnnnnnnnnnnnnnnnnnnnnnnnnnnnnnnnnnnnnnnnnnnnnnnnnnnnnnnnnnnnnnnnnnnnnnnnnnnnnnnnnnnnnnnnnnnnnnnnnnnnnnnnnnnnnnnnnnnnnnnnnnnnnnnnnnnnnnnnnnnnnnnnnnnnnnnnnnnnnnnnnnnnnnnnnnnnnnnnnnnnnnnnnnnnnnnnnnnnnnnnnnnnnnnnnnnnnnnnnnnnnnnnnnnnnnnnnnnnnnnnnnnnnnnnnnnnnnnnnnnnnnnnnnnnnnnnnnnnnnnnnnnnnnnnnnnnnnnnnnnnnnnnnnnnnnnnnnnnnnnnnnnnnnnnnnnnnnnnnnnnnnnnnnnnnnnnnnnnnnnnnnnnnnnnnnnnnnnnnnnnnnnnnnnnnnnnnnnnnnnnnnnnnnnnnnnnnnnnnnnnnnnnnnnnnnnnnnnnnnnnnnnnnnnnnnnnnnnnnnnnnnnnnnnnnnnnnnnnnnnnnnnnnnnnnnnnnnnnnnnnnnnnnnnnnnnnnnnnnnnnnnnnnnnnnnnnnnnnnnnnnnnnnnnnnnnnnnnnnnnnnnnnnnnnnnnnnnnnnnnnnnnnnnnnnnnnnnnnnnnnnnnnnnnnnnnnnnnnnnnnnnnnnnnnnnnnnnnnnnnnnnnnnnnnnnnnnnnnnnnnnnnnnnnnnnnnnnnnnnnnnnnnnnnnnnnnnnnnnnnnnnnnnnnnnnnnnnnnnnnnnnnnnnnnnnnnnnnnnnnnnnnnnnnnnnnnnnnnnnnnnnnnnnnnnnnnnnnnnnnnnnnnnnnnnnnnnnnnnnnnnnnnnnnnnnnnnnnnnnnnnnnnnnnnnnnnnnnnnnnnnnnnnnnnnnnnnnnnnnnnnnnnnnnnnnnnnnnnnnnnnnnnnnnnnnnnnnnnnnnnnnnnnnnnnnnnnnnnnnnnnnnnnnnnnnnnnnnnnnnnnnnnnnnnnnnnnnnnnnnnnnnnnnnnnnnnnnnnnnnnnnnnnnnnnnnnnnnnnnnnnnnnnnnnnnnnnnnnnnnnnnnnnnnnnnnnnnnnnnnnnnnnnnnnnnnnnnnnnnnnnnnnnnnnnnnnnnnnnnnnnnnnnnnnnnnnnnnnnnnnnnnnnnnnnnnnnnnnnnnnnnnnnnnnnnnnnnnnnnnnnnnnnnnnnnnnnnnnnnnnnnnnnnnnnnnnnnnnnnnnnnnnnnnnnnnnnnnnnnnnnnnnnnnnnnnnnnnnnnnnnnnnnnnnnnnnnnnnnnnnnnnnnnnnnnnnnnnnnnnnnnnnnnnnnnnnnnnnnnnnnnnnnnnnnnnnnnnnnnnnnnnnnnnnnnnnnnnnnnnnnnnnnnnnnnnnnnnnnnnnnnnnnnnnnnnnnnnnnnnnnnnnnnnnnnnnnnnnnnnnnnnnnnnnnnnnnnnnnnnnnnnnnnnnnnnnnnnnnnnnnnnnnnnnnnnnnnnnnnnnnnnnnnnnnnnnnnnnnnnnnnnnnnnnnnnnnnnnnnnnnnnnnnnnnnnnnnnnnnnnnnnnnnnnnnnnnnnnnnnnnnnnnnnnnnnnnnnnnnnnnnnnnnnnnnnnnnnnnnnnnnnnnnnnnnnnnnnnnnnnnnnnnnnnnnnnnnnnnnnnnnnnnnnnnnnnnnnnnnnnnnnnnnnnnnnnnnnnnnnnnnnnnnnnnnnnnnnnnnnnnnnnnnnnnnnnnnnnnnnnnnnnnnnnnnnnnnnnnnnnnnnnnnnnnnnnnnnnnnnnnnnnnnnnnnnnnnnnnnnnnnnnnnnnnnnnnnnnnnnnnnnnnnnnnnnnnnnnnnnnnnnnnnnnnnnnnnnnnnnnnnnnnnnnnnnnnnnnnnnnnnnnnnnnnnnnnnnnnnnnnnnnnnnnnnnnnnnnnnnnnnnnnnnnnnnnnnnnnnnnnnnnnnnnnnnnnnnnnnnnnnnnnnnnnnnnnnnnnnnnnnnnnnnnnnnnnnnnnnnnnnnnnnnnnnnnnnnnnnnnnnnnnnnnnnnnnnnnnnnnnnnnnnnnnnnnnnnnnnnnnnnnnnnnnnnnnnnnnnnnnnnnnnnnnnnnnnnnnnnnnnnnnnnnnnnnnnnnnnnnnnnnnnnnnnnnnnnnnnnnnnnnnnnnnnnnnnnnnnnnnnnnnnnnnnnnnnnnnnnnnnnnnnnnnnnnnnnnnnnnnnnnnnnnnnnnnnnnnnnnnnnnnnnnnnnnnnnnnnnnnnnnnnnnnnnnnnnnnnnnnnnnnnnnnnnnnnnnnnnnnnnnnnnnnnnnnnnnnnnnnnnnnnnnnnnnnnnnnnnnnnnnnnnnnnnnnnnnnnnnnnnnnnnnnnnnnnnnnnnnnnnnnnnnnnnnnnnnnnnnnnnnnnnnnnnnnnnnnnnnnnnnnnnnnnnnnnnnnnnnnnnnnnnnnnnnnnnnnnnnnnnnnnnnnnnnnnnnnnnnnnnnnnnnnnnnnnnnnnnnnnnnnnnnnnnnnnnnnnnnnnnnnnnnnnnnnnnnnnnnnnnnnnnnnnnnnnnnnnnnnnnnnnnnnnnnnnnnnnnnnnnnnnnnnnnnnnnnnnnnnnnnnnnnnnnnnnnnnnnnnnnnnnnnnnnnnnnnnnnnnnnnnnnnnnnnnnnnnnnnnnnnnnnnnnnnnnnnnnnnnnnnnnnnnnnnnnnnnnnnnnnnnnnnnnnnnnnnnnnnnnnnnnnnnnnnnnnnnnnnnnnnnnnnnnnnnnnnnnnnnnnnnnnnnnnnnnnnnnnnnnnnnnnnnnnnnnnnnnnnnnnnnnnnnnnnnnnnnnnnnnnnnnnnnnnnnnnnnnnnnnnnnnnnnnnnnnnnnnnnnnnnnnnnnnnnnnnnnnnnnnnnnnnnnnnnnnnnnnnnnnnnnnnnnnnnnnnnnnnnnnnnnnnnnnnnnnnnnnnnnnnnnnnnnnnnnnnnnnnnnnnnnnnnnnnnnnnnnnnnnnnnnnnnnnnnnnnnnnnnnnnnnnnnnnnnnnnnnnnnnnnnnnnnnnnnnnnnnnnnnnnnnnnnnnnnnnnnnnnnnnnnnnnnnnnnnnnnnnnnnnnnnnnnnnnnnnnnnnnnnnnnnnnnnnnnnnnnnnnnnnnnnnnnnnnnnnnnnnnnnnnnnnnnnnnnnnnnnnnnnnnnnnnnnnnnnnnnnnnnnnnnnnnnnnnnnnnnnnnnnnnnnnnnnnnnnnnnnnnnnnnnnnnnnnnnnnnnnnnnnnnnnnnnnnnnnnnnnnnnnnnnnnnnnnnnnnnnnnnnnnnnnnnnnnnnnnnnnnnnnnnnnnnnnnnnnnnnnnnnnnnnnnnnnnnnnnnnnnnnnnnnnnnnnnnnnnnnnnnnnnnnnnnnnnnnnnnnnnnnnnnnnnnnnnnnnnnnnnnnnnnnnnnnnnnnnnnnnnnnnnnnnnnnnnnnnnnnnnnnnnnnnnnnnnnnnnnnnnnnnnnnnnnnnnnnnnnnnnnnnnnnnnnnnnnnnnnnnnnnnnnnnnnnnnnnnnnnnnnnnnnnnnnnnnnnnnnnnnnnnnnnnnnnnnnnnnnnnnnnnnnnnnnnnnnnnnnnnnnnnnnnnnnnnnnnnnnnnnnnnnnnnnnnnnnnnnnnnnnnnnnnnnnnnnnnnnnnnnnnnnnnnnnnnnnnnnnnnnnnnnnnnnnnnnnnnnnnnnnnnnnnnnnnnnnnnnnnnnnnnnnnnnnnnnnnnnnnnnnnnnnnnnnnnnnnnnnnnnnnnnnnnnnnnnnnnnnnnnnnnnnnnnnnnnnnnnnnnnnnnnnnnnnnnnnnnnnnnnnnnnnnnnnnnnnnnnnnnnnnnnnnnnnnnnnnnnnnnnnnnnnnnnnnnnnnnnnnnnnnnnnnnnnnnnnnnnnnnnnnnnnnnnnnnnnnnnnnnnnnnnnnnnnnnnnnnnnnnnnnnnnnnnnnnnnnnnnnnnnnnnnnnnnnnnnnnnnnnnnnnnnnnnnnnnnnnnnnnnnnnnnnnnnnnnnnnnnnnnnnnnnnnnnnnnnnnnnnnnnnnnnnnnnnnnnnnnnnnnnnnnnnnnnnnnnnnnnnnnnnnnnnnnnnnnnnnnnnnnnnnnnnnnnnnnnnnnnnnnnnnnnnnnnnnnnnnnnnnnnnnnnnnnnnnnnnnnnnnnnnnnnnnnnnnnnnnnnnnnnnnnnnnnnnnnnnnnnnnnnnnnnnnnnnnnnnnnnnnnnnnnnnnnnnnnnnnnnnnnnnnnnnnnnnnnnnnnnnnnnnnnnnnnnnnnnnnnnnnnnnnnnnnnnnnnnnnnnnnnnnnnnnnnnnnnnnnnnnnnnnnnnnnnnnnnnnnnnnnnnnnnnnnnnnnnnnnnnnnnnnnnnnnnnnnnnnnnnnnnnnnnnnnnnnnnnnnnnnnnnnnnnnnnnnnnnnnnnnnnnnnnnnnnnnnnnnnnnnnnnnnnnnnnnnnnnnnnnnnnnnnnnnnnnnnnnnnnnnnnnnnnnnnnnnnnnnnnnnnnnnnnnnnnnnnnnnnnnnnnnnnnnnnnnnnnnnnnnnnnnnnnnnnnnnnnnnnnnnnnnnnnnnnnnnnnnnnnnnnnnnnnnnnnnnnnnnnnnnnnnnnnnnnnnnnnnnnnnnnnnnnnnnnnnnnnnnnnnnnnnnnnnnnnnnnnnnnnnnnnnnnnnnnnnnnnnnnnnnnnnnnnnnnnnnnnnnnnnnnnnnnnnnnnnnnnnnnnnnnnnnnnnnnnnnnnnnnnnnnnnnnnnnnnnnnnnnnnnnnnnnnnnnnnnnnnnnnnnnnnnnnnnnnnnnnnnnnnnnnnnnnnnnnnnnnnnnnnnnnnnnnnnnnnnnnnnnnnnnnnnnnnnnnnnnnnnnnnnnnnnnnnnnnnnnnnnnnnnnnnnnnnnnnnnnnnnnnnnnnnnnnnnnnnnnnnnnnnnnnnnnnnnnnnnnnnnnnnnnnnnnnnnnnnnnnnnnnnnnnnnnnnnnnnnnnnnnnnnnnnnnnnnnnnnnnnnnnnnnnnnnnnnnnnnnnnnnnnnnnnnnnnnnnnnnnnnnnnnnnnnnnnnnnnnnnnnnnnnnnnnnnnnnnnnnnnnnnnnnnnnnnnnnnnnnnnnnnnnnnnnnnnnnnnnnnnnnnnnnnnnnnnnnnnnnnnnnnnnnnnnnnnnnnnnnnnnnnnnnnnnnnnnnnnnnnnnnnnnnnnnnnnnnnnnnnnnnnnnnnnnnnnnnnnnnnnnnnnnnnnnnnnnnnnnnnnnnnnnnnnnnnnnnnnnnnnnnnnnnnnnnnnnnnnnnnnnnnnnnnnnnnnnnnnnnnnnnnnnnnnnnnnnnnnnnnnnnnnnnnnnnnnnnnnnnnnnnnnnnnnnnnnnnnnnnnnnnnnnnnnnnnnnnnnnnnnnnnnnnnnnnnnnnnnnnnnnnnnnnnnnnnnnnnnnnnnnnnnnnnnnnnnnnnnnnnnnnnnnnnnnnnnnnnnnnnnnnnnnnnnnnnnnnnnnnnnnnnnnnnnnnnnnnnnnnnnnnnnnnnnnnnnnnnnnnnnnnnnnnnnnnnnnnnnnnnnnnnnnnnnnnnnnnnnnnnnnnnnnnnnnnnnnnnnnnnnnnnnnnnnnnnnnnnnnnnnnnnnnnnnnnnnnnnnnnnnnnnnnnnnnnnnnnnnnnnnnnnnnnnnnnnnnnnnnnnnnnnnnnnnnnnnnnnnnnnnnnnnnnnnnnnnnnnnnnnnnnnnnnnnnnnnnnnnnnnnnnnnnnnnnnnnnnnnnnnnnnnnnnnnnnnnnnnnnnnnnnnnnnnnnnnnnnnnnnnnnnnnnnnnnnnnnnnnnnnnnnnnnnnnnnnnnnnnnnnnnnnnnnnnnnnnnnnnnnnnnnnnnnnnnnnnnnnnnnnnnnnnnnnnnnnnnnnnnnnnnnnnnnnnnnnnnnnnnnnnnnnnnnnnnnnnnnnnnnnnnnnnnnnnnnnnnnnnnnnnnnnnnnnnnnnnnnnnnnnnnnnnnnnnnnnnnnnnnnnnnnnnnnnnnnnnnnnnnnnnnnnnnnnnnnnnnnnnnnnnnnnnnnnnnnnnnnnnnnnnnnnnnnnnnnnnnnnnnnnnnnnnnnnnnnnnnnnnnnnnnnnnnnnnnnnnnnnnnnnnnnnnnnnnnnnnnnnnnnnnnnnnnnnnnnnnnnnnnnnnnnnnnnnnnnnnnnnnnnnnnnnnnnnnnnnnnnnnnnnnnnnnnnnnnnnnnnnnnnnnnnnnnnnnnnnnnnnnnnnnnnnnnnnnnnnnnnnnnnnnnnnnnnnnnnnnnnnnnnnnnnnnnnnnnnnnnnnnnnnnnnnnnnnnnnnnnnnnnnnnnnnnnnnnnnnnnnnnnnnnnnnnnnnnnnnnnnnnnnnnnnnnnnnnnnnnnnnnnnnnnnnnnnnnnnnnnnnnnnnnnnnnnnnnnnnnnnnnnnnnnnnnnnnnnnnnnnnnnnnnnnnnnnnnnnnnnnnnnnnnnnnnnnnnnnnnnnnnnnnnnnnnnnnnnnnnnnnnnnnnnnnnnnnnnnnnnnnnnnnnnnnnnnnnnnnnnnnnnnnnnnnnnnnnnnnnnnnnnnnnnnnnnnnnnnnnnnnnnnnnnnnnnnnnnnnnnnnnnnnnnnnnnnnnnnnnnnnnnnnnnnnnnnnnnnnnnnnnnnnnnnnnnnnnnnnnnnnnnnnnnnnnnnnnnnnnnnnnnnnnnnnnnnnnnnnnnnnnnnnnnnnnnnnnnnnnnnnnnnnnnnnnnnnnnnnnnnnnnnnnnnnnnnnnnnnnnnnnnnnnnnnnnnnnnnnnnnnnnnnnnnnnnnnnnnnnnnnnnnnnnnnnnnnnnnnnnnnnnnnnnnnnnnnnnnnnnnnnnnnnnnnnnnnnnnnnnnnnnnnnnnnnnnnnnnnnnnnnnnnnnnnnnnnnnnnnnnnnnnnnnnnnnnnnnnnnnnnnnnnnnnnnnnnnnnnnnnnnnnnnnnnnnnnnnnnnnnnnnnnnnnnnnnnnnnnnnnnnnnnnnnnnnnnnnnnnnnnnnnnnnnnnnnnnnnnnnnnnnnnnnnnnnnnnnnnnnnnnnnnnnnnnnnnnnnnnnnnnnnnnnnnnnnnnnnnnnnnnnnnnnnnnnnnnnnnnnnnnnnnnnnnnnnnnnnnnnnnnnnnnnnnnnnnnnnnnnnnnnnnnnnnnnnnnnnnnnnnnnnnnnnnnnnnnnnnnnnnnnnnnnnnnnnnnnnnnnnnnnnnnnnnnnnnnnnnnnnnnnnnnnnnnnnnnnnnnnnnnnnnnnnnnnnnnnnnnnnnnnnnnnnnnnnnnnnnnnnnnnnnnnnnnnnnnnnnnnnnnnnnnnnnnnnnnnnnnnnnnnnnnnnnnnnnnnnnnnnnnnnnnnnnnnnnnnnnnnnnnnnnnnnnnnnnnnnnnnnnnnnnnnnnnnnnnnnnnnnnnnnnnnnnnnnnnnnnnnnnnnnnnnnnnnnnnnnnnnnnnnnnnnnnnnnnnnnnnnnnnnnnnnnnnnnnnnnnnnnnnnnnnnnnnnnnnnnnnnnnnnnnnnnnnnnnnnnnnnnnnnnnnnnnnnnnnnnnnnnnnnnnnnnnnnnnnnnnnnnnnnnnnnnnnnnnnnnnnnnnnnnnnnnnnnnnnnnnnnnnnnnnnnnnnnnnnnnnnnnnnnnnnnnnnnnnnnnnnnnnnnnnnnnnnnnnnnnnnnnnnnnnnnnnnnnnnnnnnnnnnnnnnnnnnnnnnnnnnnnnnnnnnnnnnnnnnnnnnnnnnnnnnnnnnnnnnnnnnnnnnnnnnnnnnnnnnnnnnnnnnnnnnnnnnnnnnnnnnnnnnnnnnnnnnnnnnnnnnnnnnnnnnnnnnnnnnnnnnnnnnnnnnnnnnnnnnnnnnnnnnnnnnnnnnnnnnnnnnnnnnnnnnnnnnnnnnnnnnnnnnnnnnnnnnnnnnnnnnnnnnnnnnnnnnnnnnnnnnnnnnnnnnnnnnnnnnnnnnnnnnnnnnnnnnnnnnnnnnnnnnnnnnnnnnnnnnnnnnnnnnnnnnnnnnnnnnnnnnnnnnnnnnnnnnnnnnnnnnnnnnnnnnnnnnnnnnnnnnnnnnnnnnnnnnnnnnnnnnnnnnnnnnnnnnnnnnnnnnnnnnnnnnnnnnnnnnnnnnnnnnnnnnnnnnnnnnnnnnnnnnnnnnnnnnnnnnnnnnnnnnnnnnnnnnnnnnnnnnnnnnnnnnnnnnnnnnnnnnnnnnnnnnnnnnnnnnnnnnnnnnnnnnnnnnnnnnnnnnnnnnnnnnnnnnnnnnnnnnnnnnnnnnnnnnnnnnnnnnnnnnnnnnnnnnnnnnnnnnnnnnnnnnnnnnnnnnnnnnnnnnnnnnnnnnnnnnnnnnnnnnnnnnnnnnnnnnnnnnnnnnnnnnnnnnnnnnnnnnnnnnnnnnnnnnnnnnnnnnnnnnnnnnnnnnnnnnnnnnnnnnnnnnnnnnnnnnnnnnnnnnnnnnnnnnnnnnnnnnnnnnnnnnnnnnnnnnnnnnnnnnnnnnnnnnnnnnnnnnnnnnnnnnnnnnnnnnnnnnnnnnnnnnnnnnnnnnnnnnnnnnnnnnnnnnnnnnnnnnnnnnnnnnnnnnnnnnnnnnnnnnnnnnnnnnnnnnnnnnnnnnnnnnnnnnnnnnnnnnnnnnnnnnnnnnnnnnnnnnnnnnnnnnnnnnnnnnnnnnnnnnnnnnnnnnnnnnnnnnnnnnnnnnnnnnnnnnnnnnnnnnnnnnnnnnnnnnnnnnnnnnnnnnnnnnnnnnnnnnnnnnnnnnnnnnnnnnnnnnnnnnnnnnnnnnnnnnnnnnnnnnnnnnnnnnnnnnnnnnnnnnnnnnnnnnnnnnnnnnnnnnnnnnnnnnnnnnnnnnnnnnnnnnnnnnnnnnnnnnnnnnnnnnnnnnnnnnnnnnnnnnnnnnnnnnnnnnnnnnnnnnnnnnnnnnnnnnnnnnnnnnnnnnnnnnnnnnnnnnnnnnnnnnnnnnnnnnnnnnnnnnnnnnnnnnnnnnnnnnnnnnnnnnnnnnnnnnnnnnnnnnnnnnnnnnnnnnnnnnnnnnnnnnnnnnnnnnnnnnnnnnnnnnnnnnnnnnnnnnnnnnnnnnnnnnnnnnnnnnnnnnnnnnnnnnnnnnnnnnnnnnnnnnnnnnnnnnnnnnnnnnnnnnnnnnnnnnnnnnnnnnnnnnnnnnnnnnnnnnnnnnnnnnnnnnnnnnnnnnnnnnnnnnnnnnnnnnnnnnnnnnnnnnnnnnnnnnnnnnnnnnnnnnnnnnnnnnnnnnnnnnnnnnnnnnnnnnnnnnnnnnnnnnnnnnnnnnnnnnnnnnnnnnnnnnnnnnnnnnnnnnnnnnnnnnnnnnnnnnnnnnnnnnnnnnnnnnnnnnnnnnnnnnnnnnnnnnnnnnnnnnnnnnnnnnnnnnnnnnnnnnnnnnnnnnnnnnnnnnnnnnnnnnnnnnnnnnnnnnnnnnnnnnnnnnnnnnnnnnnnnnnnnnnnnnnnnnnnnnnnnnnnnnnnnnnnnnnnnnnnnnnnnnnnnnnnnnnnnnnnnnnnnnnnnnnnnnnnnnnnnnnnnnnnnnnnnnnnnnnnnnnnnnnnnnnnnnnnnnnnnnnnnnnnnnnnnnnnnnnnnnnnnnnnnnnnnnnnnnnnnnnnnnnnnnnnnnnnnnnnnnnnnnnnnnnnnnnnnnnnnnnnnnnnnnnnnnnnnnnnnnnnnnnnnnnnnnnnnnnnnnnnnnnnnnnnnnnnnnnnnnnnnnnnnnnnnnnnnnnnnnnnnnnnnnnnnnnnnnnnnnnnnnnnnnnnnnnnnnnnnnnnnnnnnnnnnnnnnnnnnnnnnnnnnnnnnnnnnnnnnnnnnnnnnnnnnnnnnnnnnnnnnnnnnnnnnnnnnnnnnnnnnnnnnnnnnnnnnnnnnnnnnnnnnnnnnnnnnnnnnnnnnnnnnnnnnnnnnnnnnnnnnnnnnnnnnnnnnnnnnnnnnnnnnnnnnnnnnnnnnnnnnnnnnnnnnnnnnnnnnnnnnnnnnnnnnnnnnnnnnnnnnnnnnnnnnnnnnnnnnnnnnnnnnnnnnnnnnnnnnnnnnnnnnnnnnnnnnnnnnnnnnnnnnnnnnnnnnnnnnnnnnnnnnnnnnnnnnnnnnnnnnnnnnnnnnnnnnnnnnnnnnnnnnnnnnnnnnnnnnnnnnnnnnnnnnnnnnnnnnnnnnnnnnnnnnnnnnnnnnnnnnnnnnnnnnnnnnnnnnnnnnnnnnnnnnnnnnnnnnnnnnnnnnnnnnnnnnnnnnnnnnnnnnnnnnnnnnnnnnnnnnnnnnnnnnnnnnnnnnnnnnnnnnnnnnnnnnnnnnnnnnnnnnnnnnnnnnnnnnnnnnnnnnnnnnnnnnnnnnnnnnnnnnnnnnnnnnnnnnnnnnnnnnnnnnnnnnnnnnnnnnnnnnnnnnnnnnnnnnnnnnnnnnnnnnnnnnnnnnnnnnnnnnnnnnnnnnnnnnnnnnnnnnnnnnnnnnnnnnnnnnnnnnnnnnnnnnnnnnnnnnnnnnnnnnnnnnnnnnnnnnnnnnnnnnnnnnnnnnnnnnnnnnnnnnnnnnnnnnnnnnnnnnnnnnnnnnnnnnnnnnnnnnnnnnnnnnnnnnnnnnnnnnnnnnnnnnnnnnnnnnnnnnnnnnnnnnnnnnnnnnnnnnnnnnnnnnnnnnnnnnnnnnnnnnnnnnnnnnnnnnnnnnnnnnnnnnnnnnnnnnnnnnnnnnnnnnnnnnnnnnnnnnnnnnnnnnnnnnnnnnnnnnnnnnnnnnnnnnnnnnnnnnnnnnnnnnnnnnnnnnnnnnnnnnnnnnnnnnnnnnnnnnnnnnnnnnnnnnnnnnnnnnnnnnnnnnnnnnnnnnnnnnnnnnnnnnnnnnnnnnnnnnnnnnnnnnnnnnnnnnnnnnnnnnnnnnnnnnnnnnnnnnnnnnnnnnnnnnnnnnnnnnnnnnnnnnnnnnnnnnnnnnnnnnnnnnnnnnnnnnnnnnnnnnnnnnnnnnnnnnnnnnnnnnnnnnnnnnnnnnnnnnnnnnnnnnnnnnnnnnnnnnnnnnnnnnnnnnnnnnnnnnnnnnnnnnnnnnnnnnnnnnnnnnnnnnnnnnnnnnnnnnnnnnnnnnnnnnnnnnnnnnnnnnnnnnnnnnnnnnnnnnnnnnnnnnnnnnnnnnnnnnnnnnnnnnnnnnnnnnnnnnnnnnnnnnnnnnnnnnnnnnnnnnnnnnnnnnnnnnnnnnnnnnnnnnnnnnnnnnnnnnnnnnnnnnnnnnnnnnnnnnnnnnnnnnnnnnnnnnnnnnnnnnnnnnnnnnnnnnnnnnnnnnnnnnnnnnnnnnnnnnnnnnnnnnnnnnnnnnnnnnnnnnnnnnnnnnnnnnnnnnnnnnnnnnnnnnnnnnnnnnnnnnnnnnnnnnnnnnnnnnnnnnnnnnnnnnnnnnnnnnnnnnnnnnnnnnnnnnnnnnnnnnnnnnnnnnnnnnnnnnnnnnnnnnnnnnnnnnnnnnnnnnnnnnnnnnnnnnnnnnnnnnnnnnnnnnnnnnnnnnnnnnnnnnnnnnnnnnnnnnnnnnnnnnnnnnnnnnnnnnnnnnnnnnnnnnnnnnnnnnnnnnnnnnnnnnnnnnnnnnnnnnnnnnnnnnnnnnnnnnnnnnnnnnnnnnnnnnnnnnnnnnnnnnnnnnnnnnnnnnnnnnnnnnnnnnnnnnnnnnnnnnnnnnnnnnnnnnnnnnnnnnnnnnnnnnnnnnnnnnnnnnnnnnnnnnnnnnnnnnnnnnnnnnnnnnnnnnnnnnnnnnnnnnnnnnnnnnnnnnnnnnnnnnnnnnnnnnnnnnnnnnnnnnnnnnnnnnnnnnnnnnnnnnnnnnnnnnnnnnnnnnnnnnnnnnnnnnnnnnnnnnnnnnnnnnnnnnnnnnnnnnnnnnnnnnnnnnnnnnnnnnnnnnnnnnnnnnnnnnnnnnnnnnnnnnnnnnnnnnnnnnnnnnnnnnnnnnnnnnnnnnnnnnnnnnnnnnnnnnnnnnnnnnnnnnnnnnnnnnnnnnnnnnnnnnnnnnnnnnnnnnnnnnnnnnnnnnnnnnnnnnnnnnnnnnnnnnnnnnnnnnnnnnnnnnnnnnnnnnnnnnnnnnnnnnnnnnnnnnnnnnnnnnnnnnnnnnnnnnnnnnnnnnnnnnnnnnnnnnnnnnnnnnnnnnnnnnnnnnnnnnnnnnnnnnnnnnnnnnnnnnnnnnnnnnnnnnnnnnnnnnnnnnnnnnnnnnnnnnnnnnnnnnnnnnnnnnnnnnnnnnnnnnnnnnnnnnnnnnnnnnnnnnnnnnnnnnnnnnnnnnnnnnnnnnnnnnnnnnnnnnnnnnnnnnnnnnnnnnnnnnnnnnnnnnnnnnnnnnnnnnnnnnnnnnnnnnnnnnnnnnnnnnnnnnnnnnnnnnnnnnnnnnnnnnnnnnnnnnnnnnnnnnnnnnnnnnnnnnnnnnnnnnnnnnnnnnnnnnnnnnnnnnnnnnnnnnnnnnnnnnnnnnnnnnnnnnnnnnnnnnnnnnnnnnnnnnnnnnnnnnnnnnnnnnnnnnnnnnnnnnnnnnnnnnnnnnnnnnnnnnnnnnnnnnnnnnnnnnnnnnnnnnnnnnnnnnnnnnnnnnnnnnnnnnnnnnnnnnnnnnnnnnnnnnnnnnnnnnnnnnnnnnnnnnnnnnnnnnnnnnnnnnnnnnnnnnnnnnnnnnnnnnnnnnnnnnnnnnnnnnnnnnnnnnnnnnnnnnnnnnnnnnnnnnnnnnnnnnnnnnnnnnnnnnnnnnnnnnnnnnnnnnnnnnnnnnnnnnnnnnnnnnnnnnnnnnnnnnnnnnnnnnnnnnnnnnnnnnnnnnnnnnnnnnnnnnnnnnnnnnnnnnnnnnnnnnnnnnnnnnnnnnnnnnnnnnnnnnnnnnnnnnnnnnnnnnnnnnnnnnnnnnnnnnnnnnnnnnnnnnnnnnnnnnnnnnnnnnnnnnnnnnnnnnnnnnnnnnnnnnnnnnnnnnnnnnnnnnnnnnnnnnnnnnnnnnnnnnnnnnnnnnnnnnnnnnnnnnnnnnnnnnnnnnnnnnnnnnnnnnnnnnnnnnnnnnnnnnnnnnnnnnnnnnnnnnnnnnnnnnnnnnnnnnnnnnnnnnnnnnnnnnnnnnnnnnnnnnnnnnnnnnnnnnnnnnnnnnnnnnnnnnnnnnnnnnnnnnnnnnnnnnnnnnnnnnnnnnnnnnnnnnnnnnnnnnnnnnnnnnnnnnnnnnnnnnnnnnnnnnnnnnnnnnnnnnnnnnnnnnnnnnnnnnnnnnnnnnnnnnnnnnnnnnnnnnnnnnnnnnnnnnnnnnnnnnnnnnnnnnnnnnnnnnnnnnnnnnnnnnnnnnnnnnnnnnnnnnnnnnnnnnnnnnnnnnnnnnnnnnnnnnnnnnnnnnnnnnnnnnnnnnnnnnnnnnnnnnnnnnnnnnnnnnnnnnnnnnnnnnnnnnnnnnnnnnnnnnnnnnnnnnnnnnnnnnnnnnnnnnnnnnnnnnnnnnnnnnnnnnnnnnnnnnnnnnnnnnnnnnnnnnnnnnnnnnnnnnnnnnnnnnnnnnnnnnnnnnnnnnnnnnnnnnnnnnnnnnnnnnnnnnnnnnnnnnnnnnnnnnnnnnnnnnnnnnnnnnnnnnnnnnnnnnnnnnnnnnnnnnnnnnnnnnnnnnnnnnnnnnnnnnnnnnnnnnnnnnnnnnnnnnnnnnnnnnnnnnnnnnnnnnnnnnnnnnnnnnnnnnnnnnnnnnnnnnnnnnnnnnnnnnnnnnnnnnnnnnnnnnnnnnnnnnnnnnnnnnnnnnnnnnnnnnnnnnnnnnnnnnnnnnnnnnnnnnnnnnnnnnnnnnnnnnnnnnnnnnnnnnnnnnnnnnnnnnnnnnnnnnnnnnnnnnnnnnnnnnnnnnnnnnnnnnnnnnnnnnnnnnnnnnnnnnnnnnnnnnnnnnnnnnnnnnnnnnnnnnnnnnnnnnnnnnnnnnnnnnnnnnnnnnnnnnnnnnnnnnnnnnnnnnnnnnnnnnnnnnnnnnnnnnnnnnnnnnnnnnnnnnnnnnnnnnnnnnnnnnnnnnnnnnnnnnnnnnnnnnnnnnnnnnnnnnnnnnnnnnnnnnnnnnnnnnnnnnnnnnnnnnnnnnnnnnnnnnnnnnnnnnnnnnnnnnnnnnnnnnnnnnnnnnnnnnnnnnnnnnnnnnnnnnnnnnnnnnnnnnnnnnnnnnnnnnnnnnnnnnnnnnnnnnnnnnnnnnnnnnnnnnnnnnnnnnnnnnnnnnnnnnnnnnnnnnnnnnnnnnnnnnnnnnnnnnnnnnnnnnnnnnnnnnnnnnnnnnnnnnnnnnnnnnnnnnnnnnnnnnnnnnnnnnnnnnnnnnnnnnnnnnnnnnnnnnnnnnnnnnnnnnnnnnnnnnnnnnnnnnnnnnnnnnnnnnnnnnnnnnnnnnnnnnnnnnnnnnnnnnnnnnnnnnnnnnnnnnnnnnnnnnnnnnnnnnnnnnnnnnnnnnnnnnnnnnnnnnnnnnnnnnnnnnnnnnnnnnnnnnnnnnnnnnnnnnnnnnnnnnnnnnnnnnnnnnnnnnnnnnnnnnnnnnnnnnnnnnnnnnnnnnnnnnnnnnnnnnnnnnnnnnnnnnnnnnnnnnnnnnnnnnnnnnnnnnnnnnnnnnnnnnnnnnnnnnnnnnnnnnnnnnnnnnnnnnnnnnnnnnnnnnnnnnnnnnnnnnnnnnnnnnnnnnnnnnnnnnnnnnnnnnnnnnnnnnnnnnnnnnnnnnnnnnnnnnnnnnnnnnnnnnnnnnnnnnnnnnnnnnnnnnnnnnnnnnnnnnnnnnnnnnnnnnnnnnnnnnnnnnnnnnnnnnnnnnnnnnnnnnnnnnnnnnnnnnnnnnnnnnnnnnnnnnnnnnnnnnnnnnnnnnnnnnnnnnnnnnnnnnnnnnnnnnnnnnnnnnnnnnnnnnnnnnnnnnnnnnnnnnnnnnnnnnnnnnnnnnnnnnnnnnnnnnnnnnnnnnnnnnnnnnnnnnnnnnnnnnnnnnnnnnnnnnnnnnnnnnnnnnnnnnnnnnnnnnnnnnnnnnnnnnnnnnnnnnnnnnnnnnnnnnnnnnnnnnnnnnnnnnnnnnnnnnnnnnnnnnnnnnnnnnnnnnnnnnnnnnnnnnnnnnnnnnnnnnnnnnnnnnnnnnnnnnnnnnnnnnnnnnnnnnnnnnnnnnnnnnnnnnnnnnnnnnnnnnnnnnnnnnnnnnnnnnnnnnnnnnnnnnnnnnnnnnnnnnnnnnnnnnnnnnnnnnnnnnnnnnnnnnnnnnnnnnnnnnnnnnnnnnnnnnnnnnnnnnnnnnnnnnnnnnnnnnnnnnnnnnnnnnnnnnnnnnnnnnnnnnnnnnnnnnnnnnnnnnnnnnnnnnnnnnnnnnnnnnnnnnnnnnnnnnnnnnnnnnnnnnnnnnnnnnnnnnnnnnnnnnnnnnnnnnnnnnnnnnnnnnnnnnnnnnnnnnnnnnnnnnnnnnnnnnnnnnnnnnnnnnnnnnnnnnnnnnnnnnnnnnnnnnnnnnnnnnnnnnnnnnnnnnnnnnnnnnnnnnnnnnnnnnnnnnnnnnnnnnnnnnnnnnnnnnnnnnnnnnnnnnnnnnnnnnnnnnnnnnnnnnnnnnnnnnnnnnnnnnnnnnnnnnnnnnnnnnnnnnnnnnnnnnnnnnnnnnnnnnnnnnnnnnnnnnnnnnnnnnnnnnnnnnnnnnnnnnnnnnnnnnnnnnnnnnnnnnnnnnnnnnnnnnnnnnnnnnnnnnnnnnnnnnnnnnnnnnnnnnnnnnnnnnnnnnnnnnnnnnnnnnnnnnnnnnnnnnnnnnnnnnnnnnnnnnnnnnnnnnnnnnnnnnnnnnnnnnnnnnnnnnnnnnnnnnnnnnnnnnnnnnnnnnnnnnnnnnnnnnnnnnnnnnnnnnnnnnnnnnnnnnnnnnnnnnnnnnnnnnnnnnnnnnnnnnnnnnnnnnnnnnnnnnnnnnnnnnnnnnnnnnnnnnnnnnnnnnnnnnnnnnnnnnnnnnnnnnnnnnnnnnnnnnnnnnnnnnnnnnnnnnnnnnnnnnnnnnnnnnnnnnnnnnnnnnnnnnnnnnnnnnnnnnnnnnnnnnnnnnnnnnnnnnnnnnnnnnnnnnnnnnnnnnnnnnnnnnnnnnnnnnnnnnnnnnnnnnnnnnnnnnnnnnnnnnnnnnnnnnnnnnnnnnnnnnnnnnnnnnnnnnnnnnnnnnnnnnnnnnnnnnnnnnnnnnnnnnnnnnnnnnnnnnnnnnnnnnnnnnnnnnnnnnnnnnnnnnnnnnnnnnnnnnnnnnnnnnnnnnnnnnnnnnnnnnnnnnnnnnnnnnnnnnnnnnnnnnnnnnnnnnnnnnnnnnnnnnnnnnnnnnnnnnnnnnnnnnnnnnnnnnnnnnnnnnnnnnnnnnnnnnnnnnnnnnnnnnnnnnnnnnnnnnnnnnnnnnnnnnnnnnnnnnnnnnnnnnnnnnnnnnnnnnnnnnnnnnnnnnnnnnnnnnnnnnnnnnnnnnnnnnnnnnnnnnnnnnnnnnnnnnnnnnnnnnnnnnnnnnnnnnnnnnnnnnnnnnnnnnnnnnnnnnnnnnnnnnnnnnnnnnnnnnnnnnnnnnnnnnnnnnnnnnnnnnnnnnnnnnnnnnnnnnnnnnnnnnnnnnnnnnnnnnnnnnnnnnnnnnnnnnnnnnnnnnnnnnnnnnnnnnnnnnnnnnnnnnnnnnnnnnnnnnnnnnnnnnnnnnnnnnnnnnnnnnnnnnnnnnnnnnnnnnnnnnnnnnnnnnnnnnnnnnnnnnnnnnnnnnnnnnnnnnnnnnnnnnnnnnnnnnnnnnnnnnnnnnnnnnnnnnnnnnnnnnnnnnnnnnnnnnnnnnnnnnnnnnnnnnnnnnnnnnnnnnnnnnnnnnnnnnnnnnnnnnnnnnnnnnnnnnnnnnnnnnnnnnnnnnnnnnnnnnnnnnnnnnnnnnnnnnnnnnnnnnnnnnnnnnnnnnnnnnnnnnnnnnnnnnnnnnnnnnnnnnnnnnnnnnnnnnnnnnnnnnnnnnnnnnnnnnnnnnnnnnnnnnnnnnnnnnnnnnnnnnnnnnnnnnnnnnnnnnnnnnnnnnnnnnnnnnnnnnnnnnnnnnnnnnnnnnnnnnnnnnnnnnnnnnnnnnnnnnnnnnnnnnnnnnnnnnnnnnnnnnnnnnnnnnnnnnnnnnnnnnnnnnnnnnnnnnnnnnnnnnnnnnnnnnnnnnnnnnnnnnnnnnnnnnnnnnnnnnnnnnnnnnnnnnnnnnnnnnnnnnnnnnnnnnnnnnnnnnnnnnnnnnnnnnnnnnnnnnnnnnnnnnnnnnnnnnnnnnnnnnnnnnnnnnnnnnnnnnnnnnnnnnnnnnnnnnnnnnnnnnnnnnnnnnnnnnnnnnnnnnnnnnnnnnnnnnnnnnnnnnnnnnnnnnnnnnnnnnnnnnnnnnnnnnnnnnnnnnnnnnnnnnnnnnnnnnnnnnnnnnnnnnnnnnnnnnnnnnnnnnnnnnnnnnnnnnnnnnnnnnnnnnnnnnnnnnnnnnnnnnnnnnnnnnnnnnnnnnnnnnnnnnnnnnnnnnnnnnnnnnnnnnnnnnnnnnnnnnnnnnnnnnnnnnnnnnnnnnnnnnnnnnnnnnnnnnnnnnnnnnnnnnnnnnnnnnnnnnnnnnnnnnnnnnnnnnnnnnnnnnnnnnnnnnnnnnnnnnnnnnnnnnnnnnnnnnnnnnnnnnnnnnnnnnnnnnnnnnnnnnnnnnnnnnnnnnnnnnnnnnnnnnnnnnnnnnnnnnnnnnnnnnnnnnnnnnnnnnnnnnnnnnnnnnnnnnnnnnnnnnnnnnnnnnnnnnnnnnnnnnnnnnnnnnnnnnnnnnnnnnnnnnnnnnnnnnnnnnnnnnnnnnnnnnnnnnnnnnnnnnnnnnnnnnnnnnnnnnnnnnnnnnnnnnnnnnnnnnnnnnnnnnnnnnnnnnnnnnnnnnnnnnnnnnnnnnnnnnnnnnnnnnnnnnnnnnnnnnnnnnnnnnnnnnnnnnnnnnnnnnnnnnnnnnnnnnnnnnnnnnnnnnnnnnnnnnnnnnnnnnnnnnnnnnnnnnnnnnnnnnnnnnnnnnnnnnnnnnnnnnnnnnnnnnnnnnnnnnnnnnnnnnnnnnnnnnnnnnnnnnnnnnnnnnnnnnnnnnnnnnnnnnnnnnnnnnnnnnnnnnnnnnnnnnnnnnnnnnnnnnnnnnnnnnnnnnnnnnnnnnnnnnnnnnnnnnnnnnnnnnnnnnnnnnnnnnnnnnnnnnnnnnnnnnnnnnnnnnnnnnnnnnnnnnnnnnnnnnnnnnnnnnnnnnnnnnnnnnnnnnnnnnnnnnnnnnnnnnnnnnnnnnnnnnnnnnnnnnnnnnnnnnnnnnnnnnnnnnnnnnnnnnnnnnnnnnnnnnnnnnnnnnnnnnnnnnnnnnnnnnnnnnnnnnnnnnnnnnnnnnnnnnnnnnnnnnnnnnnnnnnnnnnnnnnnnnnnnnnnnnnnnnnnnnnnnnnnnnnnnnnnnnnnnnnnnnnnnnnnnnnnnnnnnnnnnnnnnnnnnnnnnnnnnnnnnnnnnnnnnnnnnnnnnnnnnnnnnnnnnnnnnnnnnnnnnnnnnnnnnnnnnnnnnnnnnnnnnnnnnnnnnnnnnnnnnnnnnnnnnnnnnnnnnnnnnnnnnnnnnnnnnnnnnnnnnnnnnnnnnnnnnnnnnnnnnnnnnnnnnnnnnnnnnnnnnnnnnnnnnnnnnnnnnnnnnnnnnnnnnnnnnnnnnnnnnnnnnnnnnnnnnnnnnnnnnnnnnnnnnnnnnnnnnnnnnnnnnnnnnnnnnnnnnnnnnnnnnnnnnnnnnnnnnnnnnnnnnnnnnnnnnnnnnnnnnnnnnnnnnnnnnnnnnnnnnnnnnnnnnnnnnnnnnnnnnnnnnnnnnnnnnnnnnnnnnnnnnnnnnnnnnnnnnnnnnnnnnnnnnnnnnnnnnnnnnnnnnnnnnnnnnnnnnnnnnnnnnnnnnnnnnnnnnnnnnnnnnnnnnnnnnnnnnnnnnnnnnnnnnnnnnnnnnnnnnnnnnnnnnnnnnnnnnnnnnnnnnnnnnnnnnnnnnnnnnnnnnnnnnnnnnnnnnnnnnnnnnnnnnnnnnnnnnnnnnnnnnnnnnnnnnnnnnnnnnnnnnnnnnnnnnnnnnnnnnnnnnnnnnnnnnnnnnnnnnnnnnnnnnnnnnnnnnnnnnnnnnnnnnnnnnnnnnnnnnnnnnnnnnnnnnnnnnnnnnnnnnnnnnnnnnnnnnnnnnnnnnnnnnnnnnnnnnnnnnnnnnnnnnnnnnnnnnnnnnnnnnnnnnnnnnnnnnnnnnnnnnnnnnnnnnnnnnnnnnnnnnnnnnnnnnnnnnnnnnnnnnnnnnnnnnnnnnnnnnnnnnnnnnnnnnnnnnnnnnnnnnnnnnnnnnnnnnnnnnnnnnnnnnnnnnnnnnnnnnnnnnnnnnnnnnnnnnnnnnnnnnnnnnnnnnnnnnnnnnnnnnnnnnnnnnnnnnnnnnnnnnnnnnnnnnnnnnnnnnnnnnnnnnnnnnnnnnnnnnnnnnnnnnnnnnnnnnnnnnnnnnnnnnnnnnnnnnnnnnnnnnnnnnnnnnnnnnnnnnnnnnnnnnnnnnnnnnnnnnnnnnnnnnnnnnnnnnnnnnnnnnnnnnnnnnnnnnnnnnnnnnnnnnnnnnnnnnnnnnnnnnnnnnnnnnnnnnnnnnnnnnnnnnnnnnnnnnnnnnnnnnnnnnnnnnnnnnnnnnnnnnnnnnnnnnnnnnnnnnnnnnnnnnnnnnnnnnnnnnnnnnnnnnnnnnnnnnnnnnnnnnnnnnnnnnnnnnnnnnnnnnnnnnnnnnnnnnnnnnnnnnnnnnnnnnnnnnnnnnnnnnnnnnnnnnnnnnnnnnnnnnnnnnnnnnnnnnnnnnnnnnnnnnnnnnnnnnnnnnnnnnnnnnnnnnnnnnnnnnnnnnnnnnnnnnnnnnnnnnnnnnnnnnnnnnnnnnnnnnnnnnnnnnnnnnnnnnnnnnnnnnnnnnnnnnnnnnnnnnnnnnnnnnnnnnnnnnnnnnnnnnnnnnnnnnnnnnnnnnnnnnnnnnnnnnnnnnnnnnnnnnnnnnnnnnnnnnnnnnnnnnnnnnnnnnnnnnnnnnnnnnnnnnnnnnnnnnnnnnnnnnnnnnnnnnnnnnnnnnnnnnnnnnnnnnnnnnnnnnnnnnnnnnnnnnnnnnnnnnnnnnnnnnnnnnnnnnnnnnnnnnnnnnnnnnnnnnnnnnnnnnnnnnnnnnnnnnnnnnnnnnnnnnnnnnnnnnnnnnnnnnnnnnnnnnnnnnnnnnnnnnnnnnnnnnnnnnnnnnnnnnnnnnnnnnnnnnnnnnnnnnnnnnnnnnnnnnnnnnnnnnnnnnnnnnnnnnnnnnnnnnnnnnnnnnnnnnnnnnnnnnnnnnnnnnnnnnnnnnnnnnnnnnnnnnnnnnnnnnnnnnnnnnnnnnnnnnnnnnnnnnnnnnnnnnnnnnnnnnnnnnnnnnnnnnnnnnnnnnnnnnnnnnnnnnnnnnnnnnnnnnnnnnnnnnnnnnnnnnnnnnnnnnnnnnnnnnnnnnnnnnnnnnnnnnnnnnnnnnnnnnnnnnnnnnnnnnnnnnnnnnnnnnnnnnnnnnnnnnnnnnnnnnnnnnnnnnnnnnnnnnnnnnnnnnnnnnnnnnnnnnnnnnnnnnnnnnnnnnnnnnnnnnnnnnnnnnnnnnnnnnnnnnnnnnnnnnnnnnnnnnnnnnnnnnnnnnnnnnnnnnnnnnnnnnnnnnnnnnnnnnnnnnnnnnnnnnnnnnnnnnnnnnnnnnnnnnnnnnnnnnnnnnnnnnnnnnnnnnnnnnnnnnnnnnnnnnnnnnnnnnnnnnnnnnnnnnnnnnnnnnnnnnnnnnnnnnnnnnnnnnnnnnnnnnnnnnnnnnnnnnnnnnnnnnnnnnnnnnnnnnnnnnnnnnnnnnnnnnnnnnnnnnnnnnnnnnnnnnnnnnnnnnnnnnnnnnnnnnnnnnnnnnnnnnnnnnnnnnnnnnnnnnnnnnnnnnnnnnnnnnnnnnnnnnnnnnnnnnnnnnnnnnnnnnnnnnnnnnnnnnnnnnnnnnnnnnnnnnnnnnnnnnnnnnnnnnnnnnnnnnnnnnnnnnnnnnnnnnnnnnnnnnnnnnnnnnnnnnnnnnnnnnnnnnnnnnnnnnnnnnnnnnnnnnnnnnnnnnnnnnnnnnnnnnnnnnnnnnnnnnnnnnnnnnnnnnnnnnnnnnnnnnnnnnnnnnnnnnnnnnnnnnnnnnnnnnnnnnnnnnnnnnnnnnnnnnnnnnnnnnnnnnnnnnnnnnnnnnnnnnnnnnnnnnnnnnnnnnnnnnnnnnnnnnnnnnnnnnnnnnnnnnnnnnnnnnnnnnnnnnnnnnnnnnnnnnnnnnnnnnnnnnnnnnnnnnnnnnnnnnnnnnnnnnnnnnnnnnnnnnnnnnnnnnnnnnnnnnnnnnnnnnnnnnnnnnnnnnnnnnnnnnnnnnnnnnnnnnnnnnnnnnnnnnnnnnnnnnnnnnnnnnnnnnnnnnnnnnnnnnnnnnnnnnnnnnnnnnnnnnnnnnnnnnnnnnnnnnnnnnnnnnnnnnnnnnnnnnnnnnnnnnnnnnnnnnnnnnnnnnnnnnnnnnnnnnnnnnnnnnnnnnnnnnnnnnnnnnnnnnnnnnnnnnnnnnnnnnnnnnnnnnnnnnnnnnnnnnnnnnnnnnnnnnnnnnnnnnnnnnnnnnnnnnnnnnnnnnnnnnnnnnnnnnnnnnnnnnnnnnnnnnnnnnnnnnnnnnnnnnnnnnnnnnnnnnnnnnnnnnnnnnnnnnnnnnnnnnnnnnnnnnnnnnnnnnnnnnnnnnnnnnnnnnnnnnnnnnnnnnnnnnnnnnnnnnnnnnnnnnnnnnnnnnnnnnnnnnnnnnnnnnnnnnnnnnnnnnnnnnnnnnnnnnnnnnnnnnnnnnnnnnnnnnnnnnnnnnnnnnnnnnnnnnnnnnnnnnnnnnnnnnnnnnnnnnnnnnnnnnnnnnnnnnnnnnnnnnnnnnnnnnnnnnnnnnnnnnnnnnnnnnnnnnnnnnnnnnnnnnnnnnnnnnnnnnnnnnnnnnnnnnnnnnnnnnnnnnnnnnnnnnnnnnnnnnnnnnnnnnnnnnnnnnnnnnnnnnnnnnnnnnnnnnnnnnnnnnnnnnnnnnnnnnnnnnnnnnnnnnnnnnnnnnnnnnnnnnnnnnnnnnnnnnnnnnnnnnnnnnnnnnnnnnnnnnnnnnnnnnnnnnnnnnnnnnnnnnnnnnnnnnnnnnnnnnnnnnnnnnnnnnnnnnnnnnnnnnnnnnnnnnnnnnnnnnnnnnnnnnnnnnnnnnnnnnnnnnnnnnnnnnnnnnnnnnnnnnnnnnnnnnnnnnnnnnnnnnnnnnnnnnnnnnnnnnnnnnnnnnnnnnnnnnnnnnnnnnnnnnnnnnnnnnnnnnnnnnnnnnnnnnnnnnnnnnnnnnnnnnnnnnnnnnnnnnnnnnnnnnnnnnnnnnnnnnnnnnnnnnnnnnnnnnnnnnnnnnnnnnnnnnnnnnnnnnnnnnnnnnnnnnnnnnnnnnnnnnnnnnnnnnnnnnnnnnnnnnnnnnnnnnnnnnnnnnnnnnnnnnnnnnnnnnnnnnnnnnnnnnnnnnnnnnnnnnnnnnnnnnnnnnnnnnnnnnnnnnnnnnnnnnnnnnnnnnnnnnnnnnnnnnnnnnnnnnnnnnnnnnnnnnnnnnnnnnnnnnnnnnnnnnnnnnnnnnnnnnnnnnnnnnnnnnnnnnnnnnnnnnnnnnnnnnnnnnnnnnnnnnnnnnnnnnnnnnnnnnnnnnnnnnnnnnnnnnnnnnnnnnnnnnnnnnnnnnnnnnnnnnnnnnnnnnnnnnnnnnnnnnnnnnnnnnnnnnnnnnnnnnnnnnnnnnnnnnnnnnnnnnnnnnnnnnnnnnnnnnnnnnnnnnnnnnnnnnnnnnnnnnnnnnnnnnnnnnnnnnnnnnnnnnnnnnnnnnnnnnnnnnnnnnnnnnnnnnnnnnnnnnnnnnnnnnnnnnnnnnnnnnnnnnnnnnnnnnnnnnnnnnnnnnnnnnnnnnnnnnnnnnnnnnnnnnnnnnnnnnnnnnnnnnnnnnnnnnnnnnnnnnnnnnnnnnnnnnnnnnnnnnnnnnnnnnnnnnnnnnnnnnnnnnnnnnnnnnnnnnnnnnnnnnnnnnnnnnnnnnnnnnnnnnnnnnnnnnnnnnnnnnnnnnnnnnnnnnnnnnnnnnnnnnnnnnnnnnnnnnnnnnnnnnnnnnnnnnnnnnnnnnnnnnnnnnnnnnnnnnnnnnnnnnnnnnnnnnnnnnnnnnnnnnnnnnnnnnnnnnnnnnnnnnnnnnnnnnnnnnnnnnnnnnnnnnnnnnnnnnnnnnnnnnnnnnnnnnnnnnnnnnnnnnnnnnnnnnnnnnnnnnnnnnnnnnnnnnnnnnnnnnnnnnnnnnnnnnnnnnnnnnnnnnnnnnnnnnnnnnnnnnnnnnnnnnnnnnnnnnnnnnnnnnnnnnnnnnnnnnnnnnnnnnnnnnnnnnnnnnnnnnnnnnnnnnnnnnnnnnnnnnnnnnnnnnnnnnnnnnnnnnnnnnnnnnnnnnnnnnnnnnnnnnnnnnnnnnnnnnnnnnnnnnnnnnnnnnnnnnnnnnnnnnnnnnnnnnnnnnnnnnnnnnnnnnnnnnnnnnnnnnnnnnnnnnnnnnnnnnnnnnnnnnnnnnnnnnnnnnnnnnnnnnnnnnnnnnnnnnnnnnnnnnnnnnnnnnnnnnnnnnnnnnnnnnnnnnnnnnnnnnnnnnnnnnnnnnnnnnnnnnnnnnnnnnnnnnnnnnnnnnnnnnnnnnnnnnnnnnnnnnnnnnnnnnnnnnnnnnnnnnnnnnnnnnnnnnnnnnnnnnnnnnnnnnnnnnnnnnnnnnnnnnnnnnnnnnnnnnnnnnnnnnnnnnnnnnnnnnnnnnnnnnnnnnnnnnnnnnnnnnnnnnnnnnnnnnnnnnnnnnnnnnnnnnnnnnnnnnnnnnnnnnnnnnnnnnnnnnnnnnnnnnnnnnnnnnnnnnnnnnnnnnnnnnnnnnnnnnnnnnnnnnnnnnnnnnnnnnnnnnnnnnnnnnnnnnnnnnnnnnnnnnnnnnnnnnnnnnnnnnnnnnnnnnnnnnnnnnnnnnnnnnnnnnnnnnnnnnnnnnnnnnnnnnnnnnnnnnnnnnnnnnnnnnnnnnnnnnnnnnnnnnnnnnnnnnnnnnnnnnnnnnnnnnnnnnnnnnnnnnnnnnnnnnnnnnnnnnnnnnnnnnnnnnnnnnnnnnnnnnnnnnnnnnnnnnnnnnnnnnnnnnnnnnnnnnnnnnnnnnnnnnnnnnnnnnnnnnnnnnnnnnnnnnnnnnnnnnnnnnnnnnnnnnnnnnnnnnnnnnnnnnnnnnnnnnnnnnnnnnnnnnnnnnnnnnnnnnnnnnnnnnnnnnnnnnnnnnnnnnnnnnnnnnnnnnnnnnnnnnnnnnnnnnnnnnnnnnnnnnnnnnnnnnnnnnnnnnnnnnnnnnnnnnnnnnnnnnnnnnnnnnnnnnnnnnnnnnnnnnnnnnnnnnnnnnnnnnnnnnnnnnnnnnnnnnnnnnnnnnnnnnnnnnnnnnnnnnnnnnnnnnnnnnnnnnnnnnnnnnnnnnnnnnnnnnnnnnnnnnnnnnnnnnnnnnnnnnnnnnnnnnnnnnnnnnnnnnnnnnnnnnnnnnnnnnnnnnnnnnnnnnnnnnnnnnnnnnnnnnnnnnnnnnnnnnnnnnnnnnnnnnnnnnnnnnnnnnnnnnnnnnnnnnnnnnnnnnnnnnnnnnnnnnnnnnnnnnnnnnnnnnnnnnnnnnnnnnnnnnnnnnnnnnnnnnnnnnnnnnnnnnnnnnnnnnnnnnnnnnnnnnnnnnnnnnnnnnnnnnnnnnnnnnnnnnnnnnnnnnnnnnnnnnnnnnnnnnnnnnnnnnnnnnnnnnnnnnnnnnnnnnnnnnnnnnnnnnnnnnnnnnnnnnnnnnnnnnnnnnnnnnnnnnnnnnnnnnnnnnnnnnnnnnnnnnnnnnnnnnnnnnnnnnnnnnnnnnnnnnnnnnnnnnnnnnnnnnnnnnnnnnnnnnnnnnnnnnnnnnnnnnnnnnnnnnnnnnnnnnnnnnnnnnnnnnnnnnnnnnnnnnnnnnnnnnnnnnnnnnnnnnnnnnnnnnnnnnnnnnnnnnnnnnnnnnnnnnnnnnnnnnnnnnnnnnnnnnnnnnnnnnnnnnnnnnnnnnnnnnnnnnnnnnnnnnnnnnnnnnnnnnnnnnnnnnnnnnnnnnnnnnnnnnnnnnnnnnnnnnnnnnnnnnnnnnnnnnnnnnnnnnnnnnnnnnnnnnnnnnnnnnnnnnnnnnnnnnnnnnnnnnnnnnnnnnnnnnnnnnnnnnnnnnnnnnnnnnnnnnnnnnnnnnnnnnnnnnnnnnnnnnnnnnnnnnnnnnnnnnnnnnnnnnnnnnnnnnnnnnnnnnnnnnnnnnnnnnnnnnnnnnnnnnnnnnnnnnnnnnnnnnnnnnnnnnnnnnnnnnnnnnnnnnnnnnnnnnnnnnnnnnnnnnnnnnnnnnnnnnnnnnnnnnnnnnnnnnnnnnnnnnnnnnnnnnnnnnnnnnnnnnnnnnnnnnnnnnnnnnnnnnnnnnnnnnnnnnnnnnnnnnnnnnnnnnnnnnnnnnnnnnnnnnnnnnnnnnnnnnnnnnnnnnnnnnnnnnnnnnnnnnnnnnnnnnnnnnnnnnnnnnnnnnnnnnnnnnnnnnnnnnnnnnnnnnnnnnnnnnnnnnnnnnnnnnnnnnnnnnnnnnnnnnnnnnnnnnnnnnnnnnnnnnnnnnnnnnnnnnnnnnnnnnnnnnnnnnnnnnnnnnnnnnnnnnnnnnnnnnnnnnnnnnnnnnnnnnnnnnnnnnnnnnnnnnnnnnnnnnnnnnnnnnnnnnnnnnnnnnnnnnnnnnnnnnnnnnnnnnnnnnnnnnnnnnnnnnnnnnnnnnnnnnnnnnnnnnnnnnnnnnnnnnnnnnnnnnnnnnnnnnnnnnnnnnnnnnnnnnnnnnnnnnnnnnnnnnnnnnnnnnnnnnnnnnnnnnnnnnnnnnnnnnnnnnnnnnnnnnnnnnnnnnnnnnnnnnnnnnnnnnnnnnnnnnnnnnnnnnnnnnnnnnnnnnnnnnnnnnnnnnnnnnnnnnnnnnnnnnnnnnnnnnnnnnnnnnnnnnnnnnnnnnnnnnnnnnnnnnnnnnnnnnnnnnnnnnnnnnnnnnnnnnnnnnnnnnnnnnnnnnnnnnnnnnnnnnnnnnnnnnnnnnnnnnnnnnnnnnnnnnnnnnnnnnnnnnnnnnnnnnnnnnnnnnnnnnnnnnnnnnnnnnnnnnnnnnnnnnnnnnnnnnnnnnnnnnnnnnnnnnnnnnnnnnnnnnnnnnnnnnnnnnnnnnnnnnnnnnnnnnnnnnnnnnnnnnnnnnnnnnnnnnnnnnnnnnnnnnnnnnnnnnnnnnnnnnnnnnnnnnnnnnnnnnnnnnnnnnnnnnnnnnnnnnnnnnnnnnnnnnnnnnnnnnnnnnnnnnnnnnnnnnnnnnnnnnnnnnnnnnnnnnnnnnnnnnnnnnnnnnnnnnnnnnnnnnnnnnnnnnnnnnnnnnnnnnnnnnnnnnnnnnnnnnnnnnnnnnnnnnnnnnnnnnnnnnnnnnnnnnnnnnnnnnnnnnnnnnnnnnnnnnnnnnnnnnnnnnnnnnnnnnnnnnnnnnnnnnnnnnnnnnnnnnnnnnnnnnnnnnnnnnnnnnnnnnnnnnnnnnnnnnnnnnnnnnnnnnnnnnnnnnnnnnnnnnnnnnnnnnnnnnnnnnnnnnnnnnnnnnnnnnnnnnnnnnnnnnnnnnnnnnnnnnnnnnnnnnnnnnnnnnnnnnnnnnnnnnnnnnnnnnnnnnnnnnnnnnnnnnnnnnnnnnnnnnnnnnnnnnnnnnnnnnnnnnnnnnnnnnnnnnnnnnnnnnnnnnnnnnnnnnnnnnnnnnnnnnnnnnnnnnnnnnnnnnnnnnnnnnnnnnnnnnnnnnnnnnnnnnnnnnnnnnnnnnnnnnnnnnnnnnnnnnnnnnnnnnnnnnnnnnnnnnnnnnnnnnnnnnnnnnnnnnnnnnnnnnnnnnnnnnnnnnnnnnnnnnnnnnnnnnnnnnnnnnnnnnnnnnnnnnnnnnnnnnnnnnnnnnnnnnnnnnnnnnnnnnnnnnnnnnnnnnnnnnnnnnnnnnnnnnnnnnnnnnnnnnnnnnnnnnnnnnnnnnnnnnnnnnnnnnnnnnnnnnnnnnnnnnnnnnnnnnnnnnnnnnnnnnnnnnnnnnnnnnnnnnnnnnnnnnnnnnnnnnnnnnnnnnnnnnnnnnnnnnnnnnnnnnnnnnnnnnnnnnnnnnnnnnnnnnnnnnnnnnnnnnnnnnnnnnnnnnnnnnnnnnnnnnnnnnnnnnnnnnnnnnnnnnnnnnnnnnnnnnnnnnnnnnnnnnnnnnnnnnnnnnnnnnnnnnnnnnnnnnnnnnnnnnnnnnnnnnnnnnnnnnnnnnnnnnnnnnnnnnnnnnnnnnnnnnnnnnnnnnnnnnnnnnnnnnnnnnnnnnnnnnnnnnnnnnnnnnnnnnnnnnnnnnnnnnnnnnnnnnnnnnnnnnnnnnnnnnnnnnnnnnnnnnnnnnnnnnnnnnnnnnnnnnnnnnnnnnnnnnnnnnnnnnnnnnnnnnnnnnnnnnnnnnnnnnnnnnnnnnnnnnnnnnnnnnnnnnnnnnnnnnnnnnnnnnnnnnnnnnnnnnnnnnnnnnnnnnnnnnnnnnnnnnnnnnnnnnnnnnnnnnnnnnnnnnnnnnnnnnnnnnnnnnnnnnnnnnnnnnnnnnnnnnnnnnnnnnnnnnnnnnnnnnnnnnnnnnnnnnnnnnnnnnnnnnnnnnnnnnnnnnnnnnnnnnnnnnnnnnnnnnnnnnnnnnnnnnnnnnnnnnnnnnnnnnnnnnnnnnnnnnnnnnnnnnnnnnnnnnnnnnnnnnnnnnnnnnnnnnnnnnnnnnnnnnnnnnnnnnnnnnnnnnnnnnnnnnnnnnnnnnnnnnnnnnnnnnnnnnnnnnnnnnnnnnnnnnnnnnnnnnnnnnnnnnnnnnnnnnnnnnnnnnnnnnnnnnnnnnnnnnnnnnnnnnnnnnnnnnnnnnnnnnnnnnnnnnnnnnnnnnnnnnnnnnnnnnnnnnnnnnnnnnnnnnnnnnnnnnnnnnnnnnnnnnnnnnnnnnnnnnnnnnnnnnnnnnnnnnnnnnnnnnnnnnnnnnnnnnnnnnnnnnnnnnnnnnnnnnnnnnnnnnnnnnnnnnnnnnnnnnnnnnnnnnnnnnnnnnnnnnnnnnnnnnnnnnnnnnnnnnnnnnnnnnnnnnnnnnnnnnnnnnnnnnnnnnnnnnnnnnnnnnnnnnnnnnnnnnnnnnnnnnnnnnnnnnnnnnnnnnnnnnnnnnnnnnnnnnnnnnnnnnnnnnnnnnnnnnnnnnnnnnnnnnnnnnnnnnnnnnnnnnnnnnnnnnnnnnnnnnnnnnnnnnnnnnnnnnnnnnnnnnnnnnnnnnnnnnnnnnnnnnnnnnnnnnnnnnnnnnnnnnnnnnnnnnnnnnnnnnnnnnnnnnnnnnnnnnnnnnnnnnnnnnnnnnnnnnnnnnnnnnnnnnnnnnnnnnnnnnnnnnnnnnnnnnnnnnnnnnnnnnnnnnnnnnnnnnnnnnnnnnnnnnnnnnnnnnnnnnnnnnnnnnnnnnnnnnnnnnnnnnnnnnnnnnnnnnnnnnnnnnnnnnnnnnnnnnnnnnnnnnnnnnnnnnnnnnnnnnnnnnnnnnnnnnnnnnnnnnnnnnnnnnnnnnnnnnnnnnnnnnnnnnnnnnnnnnnnnnnnnnnnnnnnnnnnnnnnnnnnnnnnnnnnnnnnnnnnnnnnnnnnnnnnnnnnnnnnnnnnnnnnnnnnnnnnnnnnnnnnnnnnnnnnnnnnnnnnnnnnnnnnnnnnnnnnnnnnnnnnnnnnnnnnnnnnnnnnnnnnnnnnnnnnnnnnnnnnnnnnnnnnnnnnnnnnnnnnnnnnnnnnnnnnnnnnnnnnnnnnnnnnnnnnnnnnnnnnnnnnnnnnnnnnnnnnnnnnnnnnnnnnnnnnnnnnnnnnnnnnnnnnnnnnnnnnnnnnnnnnnnnnnnnnnnnnnnnnnnnnnnnnnnnnnnnnnnnnnnnnnnnnnnnnnnnnnnnnnnnnnnnnnnnnnnnnnnnnnnnnnnnnnnnnnnnnnnnnnnnnnnnnnnnnnnnnnnnnnnnnnnnnnnnnnnnnnnnnnnnnnnnnnnnnnnnnnnnnnnnnnnnnnnnnnnnnnnnnnnnnnnnnnnnnnnnnnnnnnnnnnnnnnnnnnnnnnnnnnnnnnnnnnnnnnnnnnnnnnnnnnnnnnnnnnnnnnnnnnnnnnnnnnnnnnnnnnnnnnnnnnnnnnnnnnnnnnnnnnnnnnnnnnnnnnnnnnnnnnnnnnnnnnnnnnnnnnnnnnnnnnnnnnnnnnnnnnnnnnnnnnnnnnnnnnnnnnnnnnnnnnnnnnnnnnnnnnnnnnnnnnnnnnnnnnnnnnnnnnnnnnnnnnnnnnnnnnnnnnnnnnnnnnnnnnnnnnnnnnnnnnnnnnnnnnnnnnnnnnnnnnnnnnnnnnnnnnnnnnnnnnnnnnnnnnnnnnnnnnnnnnnnnnnnnnnnnnnnnnnnnnnnnnnnnnnnnnnnnnnnnnnnnnnnnnnnnnnnnnnnnnnnnnnnnnnnnnnnnnnnnnnnnnnnnnnnnnnnnnnnnnnnnnnnnnnnnnnnnnnnnnnnnnnnnnnnnnnnnnnnnnnnnnnnnnnnnnnnnnnnnnnnnnnnnnnnnnnnnnnnnnnnnnnnnnnnnnnnnnnnnnnnnnnnnnnnnnnnnnnnnnnnnnnnnnnnnnnnnnnnnnnnnnnnnnnnnnnnnnnnnnnnnnnnnnnnnnnnnnnnnnnnnnnnnnnnnnnnnnnnnnnnnnnnnnnnnnnnnnnnnnnnnnnnnnnnnnnnnnnnnnnnnnnnnnnnnnnnnnnnnnnnnnnnnnnnnnnnnnnnnnnnnnnnnnnnnnnnnnnnnnnnnnnnnnnnnnnnnnnnnnnnnnnnnnnnnnnnnnnnnnnnnnnnnnnnnnnnnnnnnnnnnnnnnnnnnnnnnnnnnnnnnnnnnnnnnnnnnnnnnnnnnnnnnnnnnnnnnnnnnnnnnnnnnnnnnnnnnnnnnnnnnnnnnnnnnnnnnnnnnnnnnnnnnnnnnnnnnnnnnnnnnnnnnnnnnnnnnnnnnnnnnnnnnnnnnnnnnnnnnnnnnnnnnnnnnnnnnnnnnnnnnnnnnnnnnnnnnnnnnnnnnnnnnnnnnnnnnnnnnnnnnnnnnnnnnnnnnnnnnnnnnnnnnnnnnnnnnnnnnnnnnnnnnnnnnnnnnnnnnnnnnnnnnnnnnnnnnnnnnnnnnnnnnnnnnnnnnnnnnnnnnnnnnnnnnnnnnnnnnnnnnnnnnnnnnnnnnnnnnnnnnnnnnnnnnnnnnnnnnnnnnnnnnnnnnnnnnnnnnnnnnnnnnnnnnnnnnnnnnnnnnnnnnnnnnnnnnnnnnnnnnnnnnnnnnnnnnnnnnnnnnnnnnnnnnnnnnnnnnnnnnnnnnnnnnnnnnnnnnnnnnnnnnnnnnnnnnnnnnnnnnnnnnnnnnnnnnnnnnnnnnnnnnnnnnnnnnnnnnnnnnnnnnnnnnnnnnnnnnnnnnnnnnnnnnnnnnnnnnnnnnnnnnnnnnnnnnnnnnnnnnnnnnnnnnnnnnnnnnnnnnnnnnnnnnnnnnnnnnnnnnnnnnnnnnnnnnnnnnnnnnnnnnnnnnnnnnnnnnnnnnnnnnnnnnnnnnnnnnnnnnnnnnnnnnnnnnnnnnnnnnnnnnnnnnnnnnnnnnnnnnnnnnnnnnnnnnnnnnnnnnnnnnnnnnnnnnnnnnnnnnnnnnnnnnnnnnnnnnnnnnnnnnnnnnnnnnnnnnnnnnnnnnnnnnnnnnnnnnnnnnnnnnnnnnnnnnnnnnnnnnnnnnnnnnnnnnnnnnnnnnnnnnnnnnnnnnnnnnnnnnnnnnnnnnnnnnnnnnnnnnnnnnnnnnnnnnnnnnnnnnnnnnnnnnnnnnnnnnnnnnnnnnnnnnnnnnnnnnnnnnnnnnnnnnnnnnnnnnnnnnnnnnnnnnnnnnnnnnnnnnnnnnnnnnnnnnnnnnnnnnnnnnnnnnnnnnnnnnnnnnnnnnnnnnnnnnnnnnnnnnnnnnnnnnnnnnnnnnnnnnnnnnnnnnnnnnnnnnnnnnnnnnnnnnnnnnnnnnnnnnnnnnnnnnnnnnnnnnnnnnnnnnnnnnnnnnnnnnnnnnnnnnnnnnnnnnnnnnnnnnnnnnnnnnnnnnnnnnnnnnnnnnnnnnnnnnnnnnnnnnnnnnnnnnnnnnnnnnnnnnnnnnnnnnnnnnnnnnnnnnnnnnnnnnnnnnnnnnnnnnnnnnnnnnnnnnnnnnnnnnnnnnnnnnnnnnnnnnnnnnnnnnnnnnnnnnnnnnnnnnnnnnnnnnnnnnnnnnnnnnnnnnnnnnnnnnnnnnnnnnnnnnnnnnnnnnnnnnnnnnnnnnnnnnnnnnnnnnnnnnnnnnnnnnnnnnnnnnnnnnnnnnnnnnnnnnnnnnnnnnnnnnnnnnnnnnnnnnnnnnnnnnnnnnnnnnnnnnnnnnnnnnnnnnnnnnnnnnnnnnnnnnnnnnnnnnnnnnnnnnnnnnnnnnnnnnnnnnnnnnnnnnnnnnnnnnnnnnnnnnnnnnnnnnnnnnnnnnnnnnnnnnnnnnnnnnnnnnnnnnnnnnnnnnnnnnnnnnnnnnnnnnnnnnnnnnnnnnnnnnnnnnnnnnnnnnnnnnnnnnnnnnnnnnnnnnnnnnnnnnnnnnnnnnnnnnnnnnnnnnnnnnnnnnnnnnnnnnnnnnnnnnnnnnnnnnnnnnnnnnnnnnnnnnnnnnnnnnnnnnnnnnnnnnnnnnnnnnnnnnnnnnnnnnnnnnnnnnnnnnnnnnnnnnnnnnnnnnnnnnnnnnnnnnnnnnnnnnnnnnnnnnnnnnnnnnnnnnnnnnnnnnnnnnnnnnnnnnnnnnnnnnnnnnnnnnnnnnnnnnnnnnnnnnnnnnnnnnnnnnnnnnnnnnnnnnnnnnnnnnnnnnnnnnnnnnnnnnnnnnnnnnnnnnnnnnnnnnnnnnnnnnnnnnnnnnnnnnnnnnnnnnnnnnnnnnnnnnnnnnnnnnnnnnnnnnnnnnnnnnnnnnnnnnnnnnnnnnnnnnnnnnnnnnnnnnnnnnnnnnnnnnnnnnnnnnnnnnnnnnnnnnnnnnnnnnnnnnnnnnnnnnnnnnnnnnnnnnnnnnnnnnnnnnnnnnnnnnnnnnnnnnnnnnnnnnnnnnnnnnnnnnnnnnnnnnnnnnnnnnnnnnnnnnnnnnnnnnnnnnnnnnnnnnnnnnnnnnnnnnnnnnnnnnnnnnnnnnnnnnnnnnnnnnnnnnnnnnnnnnnnnnnnnnnnnnnnnnnnnnnnnnnnnnnnnnnnnnnnnnnnnnnnnnnnnnnnnnnnnnnnnnnnnnnnnnnnnnnnnnnnnnnnnnnnnnnnnnnnnnnnnnnnnnnnnnnnnnnnnnnnnnnnnnnnnnnnnnnnnnnnnnnnnnnnnnnnnnnnnnnnnnnnnnnnnnnnnnnnnnnnnnnnnnnnnnnnnnnnnnnnnnnnnnnnnnnnnnnnnnnnnnnnnnnnnnnnnnnnnnnnnnnnnnnnnnnnnnnnnnnnnnnnnnnnnnnnnnnnnnnnnnnnnnnnnnnnnnnnnnnnnnnnnnnnnnnnnnnnnnnnnnnnnnnnnnnnnnnnnnnnnnnnnnnnnnnnnnnnnnnnnnnnnnnnnnnnnnnnnnnnnnnnnnnnnnnnnnnnnnnnnnnnnnnnnnnnnnnnnnnnnnnnnnnnnnnnnnnnnnnnnnnnnnnnnnnnnnnnnnnnnnnnnnnnnnnnnnnnnnnnnnnnnnnnnnnnnnnnnnnnnnnnnnnnnnnnnnnnnnnnnnnnnnnnnnnnnnnnnnnnnnnnnnnnnnnnnnnnnnnnnnnnnnnnnnnnnnnnnnnnnnnnnnnnnnnnnnnnnnnnnnnnnnnnnnnnnnnnnnnnnnnnnnnnnnnnnnnnnnnnnnnnnnnnnnnnnnnnnnnnnnnnnnnnnnnnnnnnnnnnnnnnnnnnnnnnnnnnnnnnnnnnnnnnnnnnnnnnnnnnnnnnnnnnnnnnnnnnnnnnnnnnnnnnnnnnnnnnnnnnnnnnnnnnnnnnnnnnnnnnnnnnnnnnnnnnnnnnnnnnnnnnnnnnnnnnnnnnnnnnnnnnnnnnnnnnnnnnnnnnnnnnnnnnnnnnnnnnnnnnnnnnnnnnnnnnnnnnnnnnnnnnnnnnnnnnnnnnnnnnnnnnnnnnnnnnnnnnnnnnnnnnnnnnnnnnnnnnnnnnnnnnnnnnnnnnnnnnnnnnnnnnnnnnnnnnnnnnnnnnnnnnnnnnnnnnnnnnnnnnnnnnnnnnnnnnnnnnnnnnnnnnnnnnnnnnnnnnnnnnnnnnnnnnnnnnnnnnnnnnnnnnnnnnnnnnnnnnnnnnnnnnnnnnnnnnnnnnnnnnnnnnnnnnnnnnnnnnnnnnnnnnnnnnnnnnnnnnnnnnnnnnnnnnnnnnnnnnnnnnnnnnnnnnnnnnnnnnnnnnnnnnnnnnnnnnnnnnnnnnnnnnnnnnnnnnnnnnnnnnnnnnnnnnnnnnnnnnnnnnnnnnnnnnnnnnnnnnnnnnnnnnnnnnnnnnnnnnnnnnnnnnnnnnnnnnnnnnnnnnnnnnnnnnnnnnnnnnnnnnnnnnnnnnnnnnnnnnnnnnnnnnnnnnnnnnnnnnnnnnnnnnnnnnnnnnnnnnnnnnnnnnnnnnnnnnnnnnnnnnnnnnnnnnnnnnnnnnnnnnnnnnnnnnnnnnnnnnnnnnnnnnnnnnnnnnnnnnnnnnnnnnnnnnnnnnnnnnnnnnnnnnnnnnnnnnnnnnnnnnnnnnnnnnnnnnnnnnnnnnnnnnnnnnnnnnnnnnnnnnnnnnnnnnnnnnnnnnnnnnnnnnnnnnnnnnnnnnnnnnnnnnnnnnnnnnnnnnnnnnnnnnnnnnnnnnnnnnnnnnnnnnnnnnnnnnnnnnnnnnnnnnnnnnnnnnnnnnnnnnnnnnnnnnnnnnnnnnnnnnnnnnnnnnnnnnnnnnnnnnnnnnnnnnnnnnnnnnnnnnnnnnnnnnnnnnnnnnnnnnnnnnnnnnnnnnnnnnnnnnnnnnnnnnnnnnnnnnnnnnnnnnnnnnnnnnnnnnnnnnnnnnnnnnnnnnnnnnnnnnnnnnnnnnnnnnnnnnnnnnnnnnnnnnnnnnnnnnnnnnnnnnnnnnnnnnnnnnnnnnnnnnnnnnnnnnnnnnnnnnnnnnnnnnnnnnnnnnnnnnnnnnnnnnnnnnnnnnnnnnnnnnnnnnnnnnnnnnnnnnnnnnnnnnnnnnnnnnnnnnnnnnnnnnnnnnnnnnnnnnnnnnnnnnnnnnnnnnnnnnnnnnnnnnnnnnnnnnnnnnnnnnnnnnnnnnnnnnnnnnnnnnnnnnnnnnnnnnnnnnnnnnnnnnnnnnnnnnnnnnnnnnnnnnnnnnnnnnnnnnnnnnnnnnnnnnnnnnnnnnnnnnnnnnnnnnnnnnnnnnnnnnnnnnnnnnnnnnnnnnnnnnnnnnnnnnnnnnnnnnnnnnnnnnnnnnnnnnnnnnnnnnnnnnnnnnnnnnnnnnnnnnnnnnnnnnnnnnnnnnnnnnnnnnnnnnnnnnnnnnnnnnnnnnnnnnnnnnnnnnnnnnnnnnnnnnnnnnnnnnnnnnnnnnnnnnnnnnnnnnnnnnnnnnnnnnnnnnnnnnnnnnnnnnnnnnnnnnnnnnnnnnnnnnnnnnnnnnnnnnnnnnnnnnnnnnnnnnnnnnnnnnnnnnnnnnnnnnnnnnnnnnnnnnnnnnnnnnnnnnnnnnnnnnnnnnnnnnnnnnnnnnnnnnnnnnnnnnnnnnnnnnnnnnnnnnnnnnnnnnnnnnnnnnnnnnnnnnnnnnnnnnnnnnnnnnnnnnnnnnnnnnnnnnnnnnnnnnnnnnnnnnnnnnnnnnnnnnnnnnnnnnnnnnnnnnnnnnnnnnnnnnnnnnnnnnnnnnnnnnnnnnnnnnnnnnnnnnnnnnnnnnnnnnnnnnnnnnnnnnnnnnnnnnnnnnnnnnnnnnnnnnnnnnnnnnnnnnnnnnnnnnnnnnnnnnnnnnnnnnnnnnnnnnnnnnnnnnnnnnnnnnnnnnnnnnnnnnnnnnnnnnnnnnnnnnnnnnnnnnnnnnnnnnnnnnnnnnnnnnnnnnnnnnnnnnnnnnnnnnnnnnnnnnnnnnnnnnnnnnnnnnnnnnnnnnnnnnnnnnnnnnnnnnnnnnnnnnnnnnnnnnnnnnnnnnnnnnnnnnnnnnnnnnnnnnnnnnnnnnnnnnnnnnnnnnnnnnnnnnnnnnnnnnnnnnnnnnnnnnnnnnnnnnnnnnnnnnnnnnnnnnnnnnnnnnnnnnnnnnnnnnnnnnnnnnnnnnnnnnnnnnnnnnnnnnnnnnnnnnnnnnnnnnnnnnnnnnnnnnnnnnnnnnnnnnnnnnnnnnnnnnnnnnnnnnnnnnnnnnnnnnnnnnnnnnnnnnnnnnnnnnnnnnnnnnnnnnnnnnnnnnnnnnnnnnnnnnnnnnnnnnnnnnnnnnnnnnnnnnnnnnnnnnnnnnnnnnnnnnnnnnnnnnnnnnnnnnnnnnnnnnnnnnnnnnnnnnnnnnnnnnnnnnnnnnnnnnnnnnnnnnnnnnnnnnnnnnnnnnnnnnnnnnnnnnnnnnnnnnnnnnnnnnnnnnnnnnnnnnnnnnnnnnnnnnnnnnnnnnnnnnnnnnnnnnnnnnnnnnnnnnnnnnnnnnnnnnnnnnnnnnnnnnnnnnnnnnnnnnnnnnnnnnnnnnnnnnnnnnnnnnnnnnnnnnnnnnnnnnnnnnnnnnnnnnnnnnnnnnnnnnnnnnnnnnnnnnnnnnnnnnnnnnnnnnnnnnnnnnnnnnnnnnnnnnnnnnnnnnnnnnnnnnnnnnnnnnnnnnnnnnnnnnnnnnnnnnnnnnnnnnnnnnnnnnnnnnnnnnnnnnnnnnnnnnnnnnnnnnnnnnnnnnnnnnnnnnnnnnnnnnnnnnnnnnnnnnnnnnnnnnnnnnnnnnnnnnnnnnnnnnnnnnnnnnnnnnnnnnnnnnnnnnnnnnnnnnnnnnnnnnnnnnnnnnnnnnnnnnnnnnnnnnnnnnnnnnnnnnnnnnnnnnnnnnnnnnnnnnnnnnnnnnnnnnnnnnnnnnnnnnnnnnnnnnnnnnnnnnnnnnnnnnnnnnnnnnnnnnnnnnnnnnnnnnnnnnnnnnnnnnnnnnnnnnnnnnnnnnnnnnnnnnnnnnnnnnnnnnnnnnnnnnnnnnnnnnnnnnnnnnnnnnnnnnnnnnnnnnnnnnnnnnnnnnnnnnnnnnnnnnnnnnnnnnnnnnnnnnnnnnnnnnnnnnnnnnnnnnnnnnnnnnnnnnnnnnnnnnnnnnnnnnnnnnnnnnnnnnnnnnnnnnnnnnnnnnnnnnnnnnnnnnnnnnnnnnnnnnnnnnnnnnnnnnnnnnnnnnnnnnnnnnnnnnnnnnnnnnnnnnnnnnnnnnnnnnnnnnnnnnnnnnnnnnnnnnnnnnnnnnnnnnnnnnnnnnnnnnnnnnnnnnnnnnnnnnnnnnnnnnnnnnnnnnnnnnnnnnnnnnnnnnnnnnnnnnnnnnnnnnnnnnnnnnnnnnnnnnnnnnnnnnnnnnnnnnnnnnnnnnnnnnnnnnnnnnnnnnnnnnnnnnnnnnnnnnnnnnnnnnnnnnnnnnnnnnnnnnnnnnnnnnnnnnnnnnnnnnnnnnnnnnnnnnnnnnnnnnnnnnnnnnnnnnnnnnnnnnnnnnnnnnnnnnnnnnnnnnnnnnnnnnnnnnnnnnnnnnnnnnnnnnnnnnnnnnnnnnnnnnnnnnnnnnnnnnnnnnnnnnnnnnnnnnnnnnnnnnnnnnnnnnnnnnnnnnnnnnnnnnnnnnnnnnnnnnnnnnnnnnnnnnnnnnnnnnnnnnnnnnnnnnnnnnnnnnnnnnnnnnnnnnnnnnnnnnnnnnnnnnnnnnnnnnnnnnnnnnnnnnnnnnnnnnnnnnnnnnnnnnnnnnnnnnnnnnnnnnnnnnnnnnnnnnnnnnnnnnnnnnnnnnnnnnnnnnnnnnnnnnnnnnnnnnnnnnnnnnnnnnnnnnnnnnnnnnnnnnnnnnnnnnnnnnnnnnnnnnnnnnnnnnnnnnnnnnnnnnnnnnnnnnnnnnnnnnnnnnnnnnnnnnnnnnnnnnnnnnnnnnnnnnnnnnnnnnnnnnnnnnnnnnnnnnnnnnnnnnnnnnnnnnnnnnnnnnnnnnnnnnnnnnnnnnnnnnnnnnnnnnnnnnnnnnnnnnnnnnnnnnnnnnnnnnnnnnnnnnnnnnnnnnnnnnnnnnnnnnnnnnnnnnnnnnnnnnnnnnnnnnnnnnnnnnnnnnnnnnnnnnnnnnnnnnnnnnnnnnnnnnnnnnnnnnnnnnnnnnnnnnnnnnnnnnnnnnnnnnnnnnnnnnnnnnnnnnnnnnnnnnnnnnnnnnnnnnnnnnnnnnnnnnnnnnnnnnnnnnnnnnnnnnnnnnnnnnnnnnnnnnnnnnnnnnnnnnnnnnnnnnnnnnnnnnnnnnnnnnnnnnnnnnnnnnnnnnnnnnnnnnnnnnnnnnnnnnnnnnnnnnnnnnnnnnnnnnnnnnnnnnnnnnnnnnnnnnnnnnnnnnnnnnnnnnnnnnnnnnnnnnnnnnnnnnnnnnnnnnnnnnnnnnnnnnnnnnnnnnnnnnnnnnnnnnnnnnnnnnnnnnnnnnnnnnnnnnnnnnnnnnnnnnnnnnnnnnnnnnnnnnnnnnnnnnnnnnnnnnnnnnnnnnnnnnnnnnnnnnnnnnnnnnnnnnnnnnnnnnnnnnnnnnnnnnnnnnnnnnnnnnnnnnnnnnnnnnnnnnnnnnnnnnnnnnnnnnnnnnnnnnnnnnnnnnnnnnnnnnnnnnnnnnnnnnnnnnnnnnnnnnnnnnnnnnnnnnnnnnnnnnnnnnnnnnnnnnnnnnnnnnnnnnnnnnnnnnnnnnnnnnnnnnnnnnnnnnnnnnnnnnnnnnnnnnnnnnnnnnnnnnnnnnnnnnnnnnnnnnnnnnnnnnnnnnnnnnnnnnnnnnnnnnnnnnnnnnnnnnnnnnnnnnnnnnnnnnnnnnnnnnnnnnnnnnnnnnnnnnnnnnnnnnnnnnnnnnnnnnnnnnnnnnnnnnnnnnnnnnnnnnnnnnnnnnnnnnnnnnnnnnnnnnnnnnnnnnnnnnnnnnnnnnnnnnnnnnnnnnnnnnnnnnnnnnnnnnnnnnnnnnnnnnnnnnnnnnnnnnnnnnnnnnnnnnnnnnnnnnnnnnnnnnnnnnnnnnnnnnnnnnnnnnnnnnnnnnnnnnnnnnnnnnnnnnnnnnnnnnnnnnnnnnnnnnnnnnnnnnnnnnnnnnnnnnnnnnnnnnnnnnnnnnnnnnnnnnnnnnnnnnnnnnnnnnnnnnnnnnnnnnnnnnnnnnnnnnnnnnnnnnnnnnnnnnnnnnnnnnnnnnnnnnnnnnnnnnnnnnnnnnnnnnnnnnnnnnnnnnnnnnnnnnnnnnnnnnnnnnnnnnnnnnnnnnnnnnnnnnnnnnnnnnnnnnnnnnnnnnnnnnnnnnnnnnnnnnnnnnnnnnnnnnnnnnnnnnnnnnnnnnnnnnnnnnnnnnnnnnnnnnnnnnnnnnnnnnnnnnnnnnnnnnnnnnnnnnnnnnnnnnnnnnnnnnnnnnnnnnnnnnnnnnnnnnnnnnnnnnnnnnnnnnnnnnnnnnnnnnnnnnnnnnnnnnnnnnnnnnnnnnnnnnnnnnnnnnnnnnnnnnnnnnnnnnnnnnnnnnnnnnnnnnnnnnnnnnnnnnnnnnnnnnnnnnnnnnnnnnnnnnnnnnnnnnnnnnnnnnnnnnnnnnnnnnnnnnnnnnnnnnnnnnnnnnnnnnnnnnnnnnnnnnnnnnnnnnnnnnnnnnnnnnnnnnnnnnnnnnnnnnnnnnnnnnnnnnnnnnnnnnnnnnnnnnnnnnnnnnnnnnnnnnnnnnnnnnnnnnnnnnnnnnnnnnnnnnnnnnnnnnnnnnnnnnnnnnnnnnnnnnnnnnnnnnnnnnnnnnnnnnnnnnnnnnnnnnnnnnnnnnnnnnnnnnnnnnnnnnnnnnnnnnnnnnnnnnnnnnnnnnnnnnnnnnnnnnnnnnnnnnnnnnnnnnnnnnnnnnnnnnnnnnnnnnnnnnnnnnnnnnnnnnnnnnnnnnnnnnnnnnnnnnnnnnnnnnnnnnnnnnnnnnnnnnnnnnnnnnnnnnnnnnnnnnnnnnnnnnnnnnnnnnnnnnnnnnnnnnnnnnnnnnnnnnnnnnnnnnnnnnnnnnnnnnnnnnnnnnnnnnnnnnnnnnnnnnnnnnnnnnnnnnnnnnnnnnnnnnnnnnnnnnnnnnnnnnnnnnnnnnnnnnnnnnnnnnnnnnnnnnnnnnnnnnnnnnnnnnnnnnnnnnnnnnnnnnnnnnnnnnnnnnnnnnnnnnnnnnnnnnnnnnnnnnnnnnnnnnnnnnnnnnnnnnnnnnnnnnnnnnnnnnnnnnnnnnnnnnnnnnnnnnnnnnnnnnnnnnnnnnnnnnnnnnnnnnnnnnnnnnnnnnnnnnnnnnnnnnnnnnnnnnnnnnnnnnnnnnnnnnnnnnnnnnnnnnnnnnnnnnnnnnnnnnnnnnnnnnnnnnnnnnnnnnnnnnnnnnnnnnnnnnnnnnnnnnnnnnnnnnnnnnnnnnnnnnnnnnnnnnnnnnnnnnnnnnnnnnnnnnnnnnnnnnnnnnnnnnnnnnnnnnnnnnnnnnnnnnnnnnnnnnnnnnnnnnnnnnnnnnnnnnnnnnnnnnnnnnnnnnnnnnnnnnnnnnnnnnnnnnnnnnnnnnnnnnnnnnnnnnnnnnnnnnnnnnnnnnnnnnnnnnnnnnnnnnnnnnnnnnnnnnnnnnnnnnnnnnnnnnnnnnnnnnnnnnnnnnnnnnnnnnnnnnnnnnnnnnnnnnnnnnnnnnnnnnnnnnnnnnnnnnnnnnnnnnnnnnnnnnnnnnnnnnnnnnnnnnnnnnnnnnnnnnnnnnnnnnnnnnnnnnnnnnnnnnnnnnnnnnnnnnnnnnnnnnnnnnnnnnnnnnnnnnnnnnnnnnnnnnnnnnnnnnnnnnnnnnnnnnnnnnnnnnnnnnnnnnnnnnnnnnnnnnnnnnnnnnnnnnnnnnnnnnnnnnnnnnnnnnnnnnnnnnnnnnnnnnnnnnnnnnnnnnnnnnnnnnnnnnnnnnnnnnnnnnnnnnnnnnnnnnnnnnnnnnnnnnnnnnnnnnnnnnnnnnnnnnnnnnnnnnnnnnnnnnnnnnnnnnnnnnnnnnnnnnnnnnnnnnnnnnnnnnnnnnnnnnnnnnnnnnnnnnnnnnnnnnnnnnnnnnnnnnnnnnnnnnnnnnnnnnnnnnnnnnnnnnnnnnnnnnnnnnnnnnnnnnnnnnnnnnnnnnnnnnnnnnnnnnnnnnnnnnnnnnnnnnnnnnnnnnnnnnnnnnnnnnnnnnnnnnnnnnnnnnnnnnnnnnnnnnnnnnnnnnnnnnnnnnnnnnnnnnnnnnnnnnnnnnnnnnnnnnnnnnnnnnnnnnnnnnnnnnnnnnnnnnnnnnnnnnnnnnnnnnnnnnnnnnnnnnnnnnnnnnnnnnnnnnnnnnnnnnnnnnnnnnnnnnnnnnnnnnnnnnnnnnnnnnnnnnnnnnnnnnnnnnnnnnnnnnnnnnnnnnnnnnnnnnnnnnnnnnnnnnnnnnnnnnnnnnnnnnnnnnnnnnnnnnnnnnnnnnnnnnnnnnnnnnnnnnnnnnnnnnnnnnnnnnnnnnnnnnnnnnnnnnnnnnnnnnnnnnnnnnnnnnnnnnnnnnnnnnnnnnnnnnnnnnnnnnnnnnnnnnnnnnnnnnnnnnnnnnnnnnnnnnnnnnnnnnnnnnnnnnnnnnnnnnnnnnnnnnnnnnnnnnnnnnnnnnnnnnnnnnnnnnnnnnnnnnnnnnnnnnnnnnnnnnnnnnnnnnnnnnnnnnnnnnnnnnnnnnnnnnnnnnnnnnnnnnnnnnnnnnnnnnnnnnnnnnnnnnnnnnnnnnnnnnnnnnnnnnnnnnnnnnnnnnnnnnnnnnnnnnnnnnnnnnnnnnnnnnnnnnnnnnnnnnnnnnnnnnnnnnnnnnnnnnnnnnnnnnnnnnnnnnnnnnnnnnnnnnnnnnnnnnnnnnnnnnnnnnnnnnnnnnnnnnnnnnnnnnnnnnnnnnnnnnnnnnnnnnnnnnnnnnnnnnnnnnnnnnnnnnnnnnnnnnnnnnnnnnnnnnnnnnnnnnnnnnnnnnnnnnnnnnnnnnnnnnnnnnnnnnnnnnnnnnnnnnnnnnnnnnnnnnnnnnnnnnnnnnnnnnnnnnnnnnnnnnnnnnnnnnnnnnnnnnnnnnnnnnnnnnnnnnnnnnnnnnnnnnnnnnnnnnnnnnnnnnnnnnnnnnnnnnnnnnnnnnnnnnnnnnnnnnnnnnnnnnnnnnnnnnnnnnnnnnnnnnnnnnnnnnnnnnnnnnnnnnnnnnnnnnnnnnnnnnnnnnnnnnnnnnnnnnnnnnnnnnnnnnnnnnnnnnnnnnnnnnnnnnnnnnnnnnnnnnnnnnnnnnnnnnnnnnnnnnnnnnnnnnnnnnnnnnnnnnnnnnnnnnnnnnnnnnnnnnnnnnnnnnnnnnnnnnnnnnnnnnnnnnnnnnnnnnnnnnnnnnnnnnnnnnnnnnnnnnnnnnnnnnnnnnnnnnnnnnnnnnnnnnnnnnnnnnnnnnnnnnnnnnnnnnnnnnnnnnnnnnnnnnnnnnnnnnnnnnnnnnnnnnnnnnnnnnnnnnnnnnnnnnnnnnnnnnnnnnnnnnnnnnnnnnnnnnnnnnnnnnnnnnnnnnnnnnnnnnnnnnnnnnnnnnnnnnnnnnnnnnnnnnnnnnnnnnnnnnnnnnnnnnnnnnnnnnnnnnnnnnnnnnnnnnnnnnnnnnnnnnnnnnnnnnnnnnnnnnnnnnnnnnnnnnnnnnnnnnnnnnnnnnnnnnnnnnnnnnnnnnnnnnnnnnnnnnnnnnnnnnnnnnnnnnnnnnnnnnnnnnnnnnnnnnnnnnnnnnnnnnnnnnnnnnnnnnnnnnnnnnnnnnnnnnnnnnnnnnnnnnnnnnnnnnnnnnnnnnnnnnnnnnnnnnnnnnnnnnnnnnnnnnnnnnnnnnnnnnnnnnnnnnnnnnnnnnnnnnnnnnnnnnnnnnnnnnnnnnnnnnnnnnnnnnnnnnnnnnnnnnnnnnnnnnnnnnnnnnnnnnnnnnnnnnnnnnnnnnnnnnnnnnnnnnnnnnnnnnnnnnnnnnnnnnnnnnnnnnnnnnnnnnnnnnnnnnnnnnnnnnnnnnnnnnnnnnnnnnnnnnnnnnnnnnnnnnnnnnnnnnnnnnnnnnnnnnnnnnnnnnnnnnnnnnnnnnnnnnnnnnnnnnnnnnnnnnnnnnnnnnnnnnnnnnnnnnnnnnnnnnnnnnnnnnnnnnnnnnnnnnnnnnnnnnnnnnnnnnnnnnnnnnnnnnnnnnnnnnnnnnnnnnnnnnnnnnnnnnnnnnnnnnnnnnnnnnnnnnnnnnnnnnnnnnnnnnnnnnnnnnnnnnnnnnnnnnnnnnnnnnnnnnnnnnnnnnnnnnnnnnnnnnnnnnnnnnnnnnnnnnnnnnnnnnnnnnnnnnnnnnnnnnnnnnnnnnnnnnnnnnnnnnnnnnnnnnnnnnnnnnnnnnnnnnnnnnnnnnnnnnnnnnnnnnnnnnnnnnnnnnnnnnnnnnnnnnnnnnnnnnnnnnnnnnnnnnnnnnnnnnnnnnnnnnnnnnnnnnnnnnnnnnnnnnnnnnnnnnnnnnnnnnnnnnnnnnnnnnnnnnnnnnnnnnnnnnnnnnnnnnnnnnnnnnnnnnnnnnnnnnnnnnnnnnnnnnnnnnnnnnnnnnnnnnnnnnnnnnnnnnnnnnnnnnnnnnnnnnnnnnnnnnnnnnnnnnnnnnnnnnnnnnnnnnnnnnnnnnnnnnnnnnnnnnnnnnnnnnnnnnnnnnnnnnnnnnnnnnnnnnnnnnnnnnnnnnnnnnnnnnnnnnnnnnnnnnnnnnnnnnnnnnnnnnnnnnnnnnnnnnnnnnnnnnnnnnnnnnnnnnnnnnnnnnnnnnnnnnnnnnnnnnnnnnnnnnnnnnnnnnnnnnnnnnnnnnnnnnnnnnnnnnnnnnnnnnnnnnnnnnnnnnnnnnnnnnnnnnnnnnnnnnnnnnnnnnnnnnnnnnnnnnnnnnnnnnnnnnnnnnnnnnnnnnnnnnnnnnnnnnnnnnnnnnnnnnnnnnnnnnnnnnnnnnnnnnnnnnnnnnnnnnnnnnnnnnnnnnnnnnnnnnnnnnnnnnnnnnnnnnnnnnnnnnnnnnnnnnnnnnnnnnnnnnnnnnnnnnnnnnnnnnnnnnnnnnnnnnnnnnnnnnnnnnnnnnnnnnnnnnnnnnnnnnnnnnnnnnnnnnnnnnnnnnnnnnnnnnnnnnnnnnnnnnnnnnnnnnnnnnnnnnnnnnnnnnnnnnnnnnnnnnnnnnnnnnnnnnnnnnnnnnnnnnnnnnnnnnnnnnnnnnnnnnnnnnnnnnnnnnnnnnnnnnnnnnnnnnnnnnnnnnnnnnnnnnnnnnnnnnnnnnnnnnnnnnnnnnnnnnnnnnnnnnnnnnnnnnnnnnnnnnnnnnnnnnnnnnnnnnnnnnnnnnnnnnnnnnnnnnnnnnnnnnnnnnnnnnnnnnnnnnnnnnnnnnnnnnnnnnnnnnnnnnnnnnnnnnnnnnnnnnnnnnnnnnnnnnnnnnnnnnnnnnnnnnnnnnnnnnnnnnnnnnnnnnnnnnnnnnnnnnnnnnnnnnnnnnnnnnnnnnnnnnnnnnnnnnnnnnnnnnnnnnnnnnnnnnnnnnnnnnnnnnnnnnnnnnnnnnnnnnnnnnnnnnnnnnnnnnnnnnnnnnnnnnnnnnnnnnnnnnnnnnnnnnnnnnnnnnnnnnnnnnnnnnnnnnnnnnnnnnnnnnnnnnnnnnnnnnnnnnnnnnnnnnnnnnnnnnnnnnnnnnnnnnnnnnnnnnnnnnnnnnnnnnnnnnnnnnnnnnnnnnnnnnnnnnnnnnnnnnnnnnnnnnnnnnnnnnnnnnnnnnnnnnnnnnnnnnnnnnnnnnnnnnnnnnnnnnnnnnnnnnnnnnnnnnnnnnnnnnnnnnnnnnnnnnnnnnnnnnnnnnnnnnnnnnnnnnnnnnnnnnnnnnnnnnnnnnnnnnnnnnnnnnnnnnnnnnnnnnnnnnnnnnnnnnnnnnnnnnnnnnnnnnnnnnnnnnnnnnnnnnnnnnnnnnnnnnnnnnnnnnnnnnnnnnnnnnnnnnnnnnnnnnnnnnnnnnnnnnnnnnnnnnnnnnnnnnnnnnnnnnnnnnnnnnnnnnnnnnnnnnnnnnnnnnnnnnnnnnnnnnnnnnnnnnnnnnnnnnnnnnnnnnnnnnnnnnnnnnnnnnnnnnnnnnnnnnnnnnnnnnnnnnnnnnnnnnnnnnnnnnnnnnnnnnnnnnnnnnnnnnnnnnnnnnnnnnnnnnnnnnnnnnnnnnnnnnnnnnnnnnnnnnnnnnnnnnnnnnnnnnnnnnnnnnnnnnnnnnnnnnnnnnnnnnnnnnnnnnnnnnnnnnnnnnnnnnnnnnnnnnnnnnnnnnnnnnnnnnnnnnnnnnnnnnnnnnnnnnnnnnnnnnnnnnnnnnnnnnnnnnnnnnnnnnnnnnnnnnnnnnnnnnnnnnnnnnnnnnnnnnnnnnnnnnnnnnnnnnnnnnnnnnnnnnnnnnnnnnnnnnnnnnnnnnnnnnnnnnnnnnnnnnnnnnnnnnnnnnnnnnnnnnnnnnnnnnnnnnnnnnnnnnnnnnnnnnnnnnnnnnnnnnnnnnnnnnnnnnnnnnnnnnnnnnnnnnnnnnnnnnnnnnnnnnnnnnnnnnnnnnnnnnnnnnnnnnnnnnnnnnnnnnnnnnnnnnnnnnnnnnnnnnnnnnnnnnnnnnnnnnnnnnnnnnnnnnnnnnnnnnnnnnnnnnnnnnnnnnnnnnnnnnnnnnnnnnnnnnnnnnnnnnnnnnnnnnnnnnnnnnnnnnnnnnnnnnnnnnnnnnnnnnnnnnnnnnnnnnnnnnnnnnnnnnnnnnnnnnnnnnnnnnnnnnnnnnnnnnnnnnnnnnnnnnnnnnnnnnnnnnnnnnnnnnnnnnnnnnnnnnnnnnnnnnnnnnnnnnnnnnnnnnnnnnnnnnnnnnnnnnnnnnnnnnnnnnnnnnnnnnnnnnnnnnnnnnnnnnnnnnnnnnnnnnnnnnnnnnnnnnnnnnnnnnnnnnnnnnnnnnnnnnnnnnnnnnnnnnnnnnnnnnnnnnnnnnnnnnnnnnnnnnnnnnnnnnnnnnnnnnnnnnnnnnnnnnnnnnnnnnnnnnnnnnnnnnnnnnnnnnnnnnnnnnnnnnnnnnnnnnnnnnnnnnnnnnnnnnnnnnnnnnnnnnnnnnnnnnnnnnnnnnnnnnnnnnnnnnnnnnnnnnnnnnnnnnnnnnnnnnnnnnnnnnnnnnnnnnnnnnnnnnnnnnnnnnnnnnnnnnnnnnnnnnnnnnnnnnnnnnnnnnnnnnnnnnnnnnnnnnnnnnnnnnnnnnnnnnnnnnnnnnnnnnnnnnnnnnnnnnnnnnnnnnnnnnnnnnnnnnnnnnnnnnnnnnnnnnnnnnnnnnnnnnnnnnnnnnnnnnnnnnnnnnnnnnnnnnnnnnnnnnnnnnnnnnnnnnnnnnnnnnnnnnnnnnnnnnnnnnnnnnnnnnnnnnnnnnnnnnnnnnnnnnnnnnnnnnnnnnnnnnnnnnnnnnnnnnnnnnnnnnnnnnnnnnnnnnnnnnnnnnnnnnnnnnnnnnnnnnnnnnnnnnnnnnnnnnnnnnnnnnnnnnnnnnnnnnnnnnnnnnnnnnnnnnnnnnnnnnnnnnnnnnnnnnnnnnnnnnnnnnnnnnnnnnnnnnnnnnnnnnnnnnnnnnnnnnnnnnnnnnnnnnnnnnnnnnnnnnnnnnnnnnnnnnnnnnnnnnnnnnnnnnnnnnnnnnnnnnnnnnnnnnnnnnnnnnnnnnnnnnnnnnnnnnnnnnnnnnnnnnnnnnnnnnnnnnnnnnnnnnnnnnnnnnnnnnnnnnnnnnnnnnnnnnnnnnnnnnnnnnnnnnnnnnnnnnnnnnnnnnnnnnnnnnnnnnnnnnnnnnnnnnnnnnnnnnnnnnnnnnnnnnnnnnnnnnnnnnnnnnnnnnnnnnnnnnnnnnnnnnnnnnnnnnnnnnnnnnnnnnnnnnnnnnnnnnnnnnnnnnnnnnnnnnnnnnnnnnnnnnnnnnnnnnnnnnnnnnnnnnnnnnnnnnnnnnnnnnnnnnnnnnnnnnnnnnnnnnnnnnnnnnnnnnnnnnnnnnnnnnnnnnnnnnnnnnnnnnnnnnnnnnnnnnnnnnnnnnnnnnnnnnnnnnnnnnnnnnnnnnnnnnnnnnnnnnnnnnnnnnnnnnnnnnnnnnnnnnnnnnnnnnnnnnnnnnnnnnnnnnnnnnnnnnnnnnnnnnnnnnnnnnnnnnnnnnnnnnnnnnnnnnnnnnnnnnnnnnnnnnnnnnnnnnnnnnnnnnnnnnnnnnnnnnnnnnnnnnnnnnnnnnnnnnnnnnnnnnnnnnnnnnnnnnnnnnnnnnnnnnnnnnnnnnnnnnnnnnnnnnnnnnnnnnnnnnnnnnnnnnnnnnnnnnnnnnnnnnnnnnnnnnnnnnnnnnnnnnnnnnnnnnnnnnnnnnnnnnnnnnnnnnnnnnnnnnnnnnnnnnnnnnnnnnnnnnnnnnnnnnnnnnnnnnnnnnnnnnnnnnnnnnnnnnnnnnnnnnnnnnnnnnnnnnnnnnnnnnnnnnnnnnnnnnnnnnnnnnnnnnnnnnnnnnnnnnnnnnnnnnnnnnnnnnnnnnnnnnnnnnnnnnnnnnnnnnnnnnnnnnnnnnnnnnnnnnnnnnnnnnnnnnnnnnnnnnnnnnnnnnnnnnnnnnnnnnnnnnnnnnnnnnnnnnnnnnnnnnnnnnnnnnnnnnnnnnnnnnnnnnnnnnnnnnnnnnnnnnnnnnnnnnnnnnnnnnnnnnnnnnnnnnnnnnnnnnnnnnnnnnnnnnnnnnnnnnnnnnnnnnnnnnnnnnnnnnnnnnnnnnnnnnnnnnnnnnnnnnnnnnnnnnnnnnnnnnnnnnnnnnnnnnnnnnnnnnnnnnnnnnnnnnnnnnnnnnnnnnnnnnnnnnnnnnnnnnnnnnnnnnnnnnnnnnnnnnnnnnnnnnnnnnnnnnnnnnnnnnnnnnnnnnnnnnnnnnnnnnnnnnnnnnnnnnnnnnnnnnnnnnnnnnnnnnnnnnnnnnnnnnnnnnnnnnnnnnnnnnnnnnnnnnnnnnnnnnnnnnnnnnnnnnnnnnnnnnnnnnnnnnnnnnnnnnnnnnnnnnnnnnnnnnnnnnnnnnnnnnnnnnnnnnnnnnnnnnnnnnnnnnnnnnnnnnnnnnnnnnnnnnnnnnnnnnnnnnnnnnnnnnnnnnnnnnnnnnnnnnnnnnnnnnnnnnnnnnnnnnnnnnnnnnnnnnnnnnnnnnnnnnnnnnnnnnnnnnnnnnnnnnnnnnnnnnnnnnnnnnnnnnnnnnnnnnnnnnnnnnnnnnnnnnnnnnnnnnnnnnnnnnnnnnnnnnnnnnnnnnnnnnnnnnnnnnnnnnnnnnnnnnnnnnnnnnnnnnnnnnnnnnnnnnnnnnnnnnnnnnnnnnnnnnnnnnnnnnnnnnnnnnnnnnnnnnnnnnnnnnnnnnnnnnnnnnnnnnnnnnnnnnnnnnnnnnnnnnnnnnnnnnnnnnnnnnnnnnnnnnnnnnnnnnnnnnnnnnnnnnnnnnnnnnnnnnnnnnnnnnnnnnnnnnnnnnnnnnnnnnnnnnnnnnnnnnnnnnnnnnnnnnnnnnnnnnnnnnnnnnnnnnnnnnnnnnnnnnnnnnnnnnnnnnnnnnnnnnnnnnnnnnnnnnnnnnnnnnnnnnnnnnnnnnnnnnnnnnnnnnnnnnnnnnnnnnnnnnnnnnnnnnnnnnnnnnnnnnnnnnnnnnnnnnnnnnnnnnnnnnnnnnnnnnnnnnnnnnnnnnnnnnnnnnnnnnnnnnnnnnnnnnnnnnnnnnnnnnnnnnnnnnnnnnnnnnnnnnnnnnnnnnnnnnnnnnnnnnnnnnnnnnnnnnnnnnnnnnnnnnnnnnnnnnnnnnnnnnnnnnnnnnnnnnnnnnnnnnnnnnnnnnnnnnnnnnnnnnnnnnnnnnnnnnnnnnnnnnnnnnnnnnnnnnnnnnnnnnnnnnnnnnnnnnnnnnnnnnnnnnnnnnnnnnnnnnnnnnnnnnnnnnnnnnnnnnnnnnnnnnnnnnnnnnnnnnnnnnnnnnnnnnnnnnnnnnnnnnnnnnnnnnnnnnnnnnnnnnnnnnnnnnnnnnnnnnnnnnnnnnnnnnnnnnnnnnnnnnnnnnnnnnnnnnnnnnnnnnnnnnnnnnnnnnnnnnnnnnnnnnnnnnnnnnnnnnnnnnnnnnnnnnnnnnnnnnnnnnnnnnnnnnnnnnnnnnnnnnnnnnnnnnnnnnnnnnnnnnnnnnnnnnnnnnnnnnnnnnnnnnnnnnnnnnnnnnnnnnnnnnnnnnnnnnnnnnnnnnnnnnnnnnnnnnnnnnnnnnnnnnnnnnnnnnnnnnnnnnnnnnnnnnnnnnnnnnnnnnnnnnnnnnnnnnnnnnnnnnnnnnnnnnnnnnnnnnnnnnnnnnnnnnnnnnnnnnnnnnnnnnnnnnnnnnnnnnnnnnnnnnnnnnnnnnnnnnnnnnnnnnnnnnnnnnnnnnnnnnnnnnnnnnnnnnnnnnnnnnnnnnnnnnnnnnnnnnnnnnnnnnnnnnnnnnnnnnnnnnnnnnnnnnnnnnnnnnnnnnnnnnnnnnnnnnnnnnnnnnnnnnnnnnnnnnnnnnnnnnnnnnnnnnnnnnnnnnnnnnnnnnnnnnnnnnnnnnnnnnnnnnnnnnnnnnnnnnnnnnnnnnnnnnnnnnnnnnnnnnnnnnnnnnnnnnnnnnnnnnnnnnnnnnnnnnnnnnnnnnnnnnnnnnnnnnnnnnnnnnnnnnnnnnnnnnnnnnnnnnnnnnnnnnnnnnnnnnnnnnnnnnnnnnnnnnnnnnnnnnnnnnnnnnnnnnnnnnnnnnnnnnnnnnnnnnnnnnnnnnnnnnnnnnnnnnnnnnnnnnnnnnnnnnnnnnnnnnnnnnnnnnnnnnnnnnnnnnnnnnnnnnnnnnnnnnnnnnnnnnnnnnnnnnnnnnnnnnnnnnnnnnnnnnnnnnnnnnnnnnnnnnnnnnnnnnnnnnnnnnnnnnnnnnnnnnnnnnnnnnnnnnnnnnnnnnnnnnnnnnnnnnnnnnnnnnnnnnnnnnnnnnnnnnnnnnnnnnnnnnnnnnnnnnnnnnnnnnnnnnnnnnnnnnnnnnnnnnnnnnnnnnnnnnnnnnnnnnnnnnnnnnnnnnnnnnnnnnnnnnnnnnnnnnnnnnnnnnnnnnnnnnnnnnnnnnnnnnnnnnnnnnnnnnnnnnnnnnnnnnnnnnnnnnnnnnnnnnnnnnnnnnnnnnnnnnnnnnnnnnnnnnnnnnnnnnnnnnnnnnnnnnnnnnnnnnnnnnnnnnnnnnnnnnnnnnnnnnnnnnnnnnnnnnnnnnnnnnnnnnnnnnnnnnnnnnnnnnnnnnnnnnnnnnnnnnnnnnnnnnnnnnnnnnnnnnnnnnnnnnnnnnnnnnnnnnnnnnnnnnnnnnnnnnnnnnnnnnnnnnnnnnnnnnnnnnnnnnnnnnnnnnnnnnnnnnnnnnnnnnnnnnnnnnnnnnnnnnnnnnnnnnnnnnnnnnnnnnnnnnnnnnnnnnnnnnnnnnnnnnnnnnnnnnnnnnnnnnnnnnnnnnnnnnnnnnnnnnnnnnnnnnnnnnnnnnnnnnnnnnnnnnnnnnnnnnnnnnnnnnnnnnnnnnnnnnnnnnnnnnnnnnnnnnnnnnnnnnnnnnnnnnnnnnnnnnnnnnnnnnnnnnnnnnnnnnnnnnnnnnnnnnnnnnnnnnnnnnnnnnnnnnnnnnnnnnnnnnnnnnnnnnnnnnnnnnnnnnnnnnnnnnnnnnnnnnnnnnnnnnnnnnnnnnnnnnnnnnnnnnnnnnnnnnnnnnnnnnnnnnnnnnnnnnnnnnnnnnnnnnnnnnnnnnnnnnnnnnnnnnnnnnnnnnnnnnnnnnnnnnnnnnnnnnnnnnnnnnnnnnnnnnnnnnnnnnnnnnnnnnnnnnnnnnnnnnnnnnnnnnnnnnnnnnnnnnnnnnnnnnnnnnnnnnnnnnnnnnnnnnnnnnnnnnnnnnnnnnnnnnnnnnnnnnnnnnnnnnnnnnnnnnnnnnnnnnnnnnnnnnnnnnnnnnnnnnnnnnnnnnnnnnnnnnnnnnnnnnnnnnnnnnnnnnnnnnnnnnnnnnnnnnnnnnnnnnnnnnnnnnnnnnnnnnnnnnnnnnnnnnnnnnnnnnnnnnnnnnnnnnnnnnnnnnnnnnnnnnnnnnnnnnnnnnnnnnnnnnnnnnnnnnnnnnnnnnnnnnnnnnnnnnnnnnnnnnnnnnnnnnnnnnnnnnnnnnnnnnnnnnnnnnnnnnnnnnnnnnnnnnnnnnnnnnnnnnnnnnnnnnnnnnnnnnnnnnnnnnnnnnnnnnnnnnnnnnnnnnnnnnnnnnnnnnnnnnnnnnnnnnnnnnnnnnnnnnnnnnnnnnnnnnnnnnnnnnnnnnnnnnnnnnnnnnnnnnnnnnnnnnnnnnnnnnnnnnnnnnnnnnnnnnnnnnnnnnnnnnnnnnnnnnnnnnnnnnnnnnnnnnnnnnnnnnnnnnnnnnnnnnnnnnnnnnnnnnnnnnnnnnnnnnnnnnnnnnnnnnnnnnnnnnnnnnnnnnnnnnnnnnnnnnnnnnnnnnnnnnnnnnnnnnnnnnnnnnnnnnnnnnnnnnnnnnnnnnnnnnnnnnnnnnnnnnnnnnnnnnnnnnnnnnnnnnnnnnnnnnnnnnnnnnnnnnnnnnnnnnnnnnnnnnnnnnnnnnnnnnnnnnnnnnnnnnnnnnnnnnnnnnnnnnnnnnnnnnnnnnnnnnnnnnnnnnnnnnnnnnnnnnnnnnnnnnnnnnnnnnnnnnnnnnnnnnnnnnnnnnnnnnnnnnnnnnnnnnnnnnnnnnnnnnnnnnnnnnnnnnnnnnnnnnnnnnnnnnnnnnnnnnnnnnnnnnnnnnnnnnnnnnnnnnnnnnnnnnnnnnnnnnnnnnnnnnnnnnnnnnnnnnnnnnnnnnnnnnnnnnnnnnnnnnnnnnnnnnnnnnnnnnnnnnnnnnnnnnnnnnnnnnnnnnnnnnnnnnnnnnnnnnnnnnnnnnnnnnnnnnnnnnnnnnnnnnnnnnnnnnnnnnnnnnnnnnnnnnnnnnnnnnnnnnnnnnnnnnnnnnnnnnnnnnnnnnnnnnnnnnnnnnnnnnnnnnnnnnnnnnnnnnnnnnnnnnnnnnnnnnnnnnnnnnnnnnnnnnnnnnnnnnnnnnnnnnnnnnnnnnnnnnnnnnnnnnnnnnnnnnnnnnnnnnnnnnnnnnnnnnnnnnnnnnnnnnnnnnnnnnnnnnnnnnnnnnnnnnnnnnnnnnnnnnnnnnnnnnnnnnnnnnnnnnnnnnnnnnnnnnnnnnnnnnnnnnnnnnnnnnnnnnnnnnnnnnnnnnnnnnnnnnnnnnnnnnnnnnnnnnnnnnnnnnnnnnnnnnnnnnnnnnnnnnnnnnnnnnnnnnnnnnnnnnnnnnnnnnnnnnnnnnnnnnnnnnnnnnnnnnnnnnnnnnnnnnnnnnnnnnnnnnnnnnnnnnnnnnnnnnnnnnnnnnnnnnnnnnnnnnnnnnnnnnnnnnnnnnnnnnnnnnnnnnnnnnnnnnnnnnnnnnnnnnnnnnnnnnnnnnnnnnnnnnnnnnnnnnnnnnnnnnnnnnnnnnnnnnnnnnnnnnnnnnnnnnnnnnnnnnnnnnnnnnnnnnnnnnnnnnnnnnnnnnnnnnnnnnnnnnnnnnnnnnnnnnnnnnnnnnnnnnnnnnnnnnnnnnnnnnnnnnnnnnnnnnnnnnnnnnnnnnnnnnnnnnnnnnnnnnnnnnnnnnnnnnnnnnnnnnnnnnnnnnnnnnnnnnnnnnnnnnnnnnnnnnnnnnnnnnnnnnnnnnnnnnnnnnnnnnnnnnnnnnnnnnnnnnnnnnnnnnnnnnnnnnnnnnnnnnnnnnnnnnnnnnnnnnnnnnnnnnnnnnnnnnnnnnnnnnnnnnnnnnnnnnnnnnnnnnnnnnnnnnnnnnnnnnnnnnnnnnnnnnnnnnnnnnnnnnnnnnnnnnnnnnnnnnnnnnnnnnnnnnnnnnnnnnnnnnnnnnnnnnnnnnnnnnnnnnnnnnnnnnnnnnnnnnnnnnnnnnnnnnnnnnnnnnnnnnnnnnnnnnnnnnnnnnnnnnnnnnnnnnnnnnnnnnnnnnnnnnnnnnnnnnnnnnnnnnnnnnnnnnnnnnnnnnnnnnnnnnnnnnnnnnnnnnnnnnnnnnnnnnnnnnnnnnnnnnnnnnnnnnnnnnnnnnnnnnnnnnnnnnnnnnnnnnnnnnnnnnnnnnnnnnnnnnnnnnnnnnnnnnnnnnnnnnnnnnnnnnnnnnnnnnnnnnnnnnnnnnnnnnnnnnnnnnnnnnnnnnnnnnnnnnnnnnnnnnnnnnnnnnnnnnnnnnnnnnnnnnnnnnnnnnnnnnnnnnnnnnnnnnnnnnnnnnnnnnnnnnnnnnnnnnnnnnnnnnnnnnnnnnnnnnnnnnnnnnnnnnnnnnnnnnnnnnnnnnnnnnnnnnnnnnnnnnnnnnnnnnnnnnnnnnnnnnnnnnnnnnnnnnnnnnnnnnnnnnnnnnnnnnnnnnnnnnnnnnnnnnnnnnnnnnnnnnnnnnnnnnnnnnnnnnnnnnnnnnnnnnnnnnnnnnnnnnnnnnnnnnnnnnnnnnnnnnnnnnnnnnnnnnnnnnnnnnnnnnnnnnnnnnnnnnnnnnnnnnnnnnnnnnnnnnnnnnnnnnnnnnnnnnnnnnnnnnnnnnnnnnnnnnnnnnnnnnnnnnnnnnnnnnnnnnnnnnnnnnnnnnnnnnnnnnnnnnnnnnnnnnnnnnnnnnnnnnnnnnnnnnnnnnnnnnnnnnnnnnnnnnnnnnnnnnnnnnnnnnnnnnnnnnnnnnnnnnnnnnnnnnnnnnnnnnnnnnnnnnnnnnnnnnnnnnnnnnnnnnnnnnnnnnnnnnnnnnnnnnnnnnnnnnnnnnnnnnnnnnnnnnnnnnnnnnnnnnnnnnnnnnnnnnnnnnnnnnnnnnnnnnnnnnnnnnnnnnnnnnnnnnnnnnnnnnnnnnnnnnnnnnnnnnnnnnnnnnnnnnnnnnnnnnnnnnnnnnnnnnnnnnnnnnnnnnnnnnnnnnnnnnnnnnnnnnnnnnnnnnnnnnnnnnnnnnnnnnnnnnnnnnnnnnnnnnnnnnnnnnnnnnnnnnnnnnnnnnnnnnnnnnnnnnnnnnnnnnnnnnnnnnnnnnnnnnnnnnnnnnnnnnnnnnnnnnnnnnnnnnnnnnnnnnnnnnnnnnnnnnnnnnnnnnnnnnnnnnnnnnnnnnnnnnnnnnnnnnnnnnnnnnnnnnnnnnnnnnnnnnnnnnnnnnnnnnnnnnnnnnnnnnnnnnnnnnnnnnnnnnnnnnnnnnnnnnnnnnnnnnnnnnnnnnnnnnnnnnnnnnnnnnnnnnnnnnnnnnnnnnnnnnnnnnnnnnnnnnnnnnnnnnnnnnnnnnnnnnnnnnnnnnnnnnnnnnnnnnnnnnnnnnnnnnnnnnnnnnnnnnnnnnnnnnnnnnnnnnnnnnnnnnnnnnnnnnnnnnnnnnnnnnnnnnnnnnnnnnnnnnnnnnnnnnnnnnnnnnnnnnnnnnnnnnnnnnnnnnnnnnnnnnnnnnnnnnnnnnnnnnnnnnnnnnnnnnnnnnnnnnnnnnnnnnnnnnnnnnnnnnnnnnnnnnnnnnnnnnnnnnnnnnnnnnnnnnnnnnnnnnnnnnnnnnnnnnnnnnnnnnnnnnnnnnnnnnnnnnnnnnnnnnnnnnnnnnnnnnnnnnnnnnnnnnnnnnnnnnnnnnnnnnnnnnnnnnnnnnnnnnnnnnnnnnnnnnnnnnnnnnnnnnnnnnnnnnnnnnnnnnnnnnnnnnnnnnnnnnnnnnnnnnnnnnnnnnnnnnnnnnnnnnnnnnnnnnnnnnnnnnnnnnnnnnnnnnnnnnnnnnnnnnnnnnnnnnnnnnnnnnnnnnnnnnnnnnnnnnnnnnnnnnnnnnnnnnnnnnnnnnnnnnnnnnnnnnnnnnnnnnnnnnnnnnnnnnnnnnnnnnnnnnnnnnnnnnnnnnnnnnnnnnnnnnnnnnnnnnnnnnnnnnnnnnnnnnnnnnnnnnnnnnnnnnnnnnnnnnnnnnnnnnnnnnnnnnnnnnnnnnnnnnnnnnnnnnnnnnnnnnnnnnnnnnnnnnnnnnnnnnnnnnnnnnnnnnnnnnnnnnnnnnnnnnnnnnnnnnnnnnnnnnnnnnnnnnnnnnnnnnnnnnnnnnnnnnnnnnnnnnnnnnnnnnnnnnnnnnnnnnnnnnnnnnnnnnnnnnnnnnnnnnnnnnnnnnnnnnnnnnnnnnnnnnnnnnnnnnnnnnnnnnnnnnnnnnnnnnnnnnnnnnnnnnnnnnnnnnnnnnnnnnnnnnnnnnnnnnnnnnnnnnnnnnnnnnnnnnnnnnnnnnnnnnnnnnnnnnnnnnnnnnnnnnnnnnnnnnnnnnnnnnnnnnnnnnnnnnnnnnnnnnnnnnnnnnnnnnnnnnnnnnnnnnnnnnnnnnnnnnnnnnnnnnnnnnnnnnnnnnnnnnnnnnnnnnnnnnnnnnnnnnnnnnnnnnnnnnnnnnnnnnnnnnnnnnnnnnnnnnnnnnnnnnnnnnnnnnnnnnnnnnnnnnnnnnnnnnnnnnnnnnnnnnnnnnnnnnnnnnnnnnnnnnnnnnnnnnnnnnnnnnnnnnnnnnnnnnnnnnnnnnnnnnnnnnnnnnnnnnnnnnnnnnnnnnnnnnnnnnnnnnnnnnnnnnnnnnnnnnnnnnnnnnnnnnnnnnnnnnnnnnnnnnnnnnnnnnnnnnnnnnnnnnnnnnnnnnnnnnnnnnnnnnnnnnnnnnnnnnnnnnnnnnnnnnnnnnnnnnnnnnnnnnnnnnnnnnnnnnnnnnnnnnnnnnnnnnnnnnnnnnnnnnnnnnnnnnnnnnnnnnnnnnnnnnnnnnnnnnnnnnnnnnnnnnnnnnnnnnnnnnnnnnnnnnnnnnnnnnnnnnnnnnnnnnnnnnnnnnnnnnnnnnnnnnnnnnnnnnnnnnnnnnnnnnnnnnnnnnnnnnnnnnnnnnnnnnnnnnnnnnnnnnnnnnnnnnnnnnnnnnnnnnnnnnnnnnnnnnnnnnnnnnnnnnnnnnnnnnnnnnnnnnnnnnnnnnnnnnnnnnnnnnnnnnnnnnnnnnnnnnnnnnnnnnnnnnnnnnnnnnnnnnnnnnnnnnnnnnnnnnnnnnnnnnnnnnnnnnnnnnnnnnnnnnnnnnnnnnnnnnnnnnnnnnnnnnnnnnnnnnnnnnnnnnnnnnnnnnnnnnnnnnnnnnnnnnnnnnnnnnnnnnnnnnnnnnnnnnnnnnnnnnnnnnnnnnnnnnnnnnnnnnnnnnnnnnnnnnnnnnnnnnnnnnnnnnnnnnnnnnnnnnnnnnnnnnnnnnnnnnnnnnnnnnnnnnnnnnnnnnnnnnnnnnnnnnnnnnnnnnnnnnnnnnnnnnnnnnnnnnnnnnnnnnnnnnnnnnnnnnnnnnnnnnnnnnnnnnnnnnnnnnnnnnnnnnnnnnnnnnnnnnnnnnnnnnnnnnnnnnnnnnnnnnnnnnnnnnnnnnnnnnnnnnnnnnnnnnnnnnnnnnnnnnnnnnnnnnnnnnnnnnnnnnnnnnnnnnnnnnnnnnnnnnnnnnnnnnnnnnnnnnnnnnnnnnnnnnnnnnnnnnnnnnnnnnnnnnnnnnnnnnnnnnnnnnnnnnnnnnnnnnnnnnnnnnnnnnnnnnnnnnnnnnnnnnnnnnnnnnnnnnnnnnnnnnnnnnnnnnnnnnnnnnnnnnnnnnnnnnnnnnnnnnnnnnnnnnnnnnnnnnnnnnnnnnnnnnnnnnnnnnnnnnnnnnnnnnnnnnnnnnnnnnnnnnnnnnnnnnnnnnnnnnnnnnnnnnnnnnnnnnnnnnnnnnnnnnnnnnnnnnnnnnnnnnnnnnnnnnnnnnnnnnnnnnnnnnnnnnnnnnnnnnnnnnnnnnnnnnnnnnnnnnnnnnnnnnnnnnnnnnnnnnnnnnnnnnnnnnnnnnnnnnnnnnnnnnnnnnnnnnnnnnnnnnnnnnnnnnnnnnnnnnnnnnnnnnnnnnnnnnnnnnnnnnnnnnnnnnnnnnnnnnnnnnnnnnnnnnnnnnnnnnnnnnnnnnnnnnnnnnnnnnnnnnnnnnnnnnnnnnnnnnnnnnnnnnnnnnnnnnnnnnnnnnnnnnnnnnnnnnnnnnnnnnnnnnnnnnnnnnnnnnnnnnnnnnnnnnnnnnnnnnnnnnnnnnnnnnnnnnnnnnnnnnnnnnnnnnnnnnnnnnnnnnnnnnnnnnnnnnnnnnnnnnnnnnnnnnnnnnnnnnnnnnnnnnnnnnnnnnnnnnnnnnnnnnnnnnnnnnnnnnnnnnnnnnnnnnnnnnnnnnnnnnnnnnnnnnnnnnnnnnnnnnnnnnnnnnnnnnnnnnnnnnnnnnnnnnnnnnnnnnnnnnnnnnnnnnnnnnnnnnnnnnnnnnnnnnnnnnnnnnnnnnnnnnnnnnnnnnnnnnnnnnnnnnnnnnnnnnnnnnnnnnnnnnnnnnnnnnnnnnnnnnnnnnnnnnnnnnnnnnnnnnnnnnnnnnnnnnnnnnnnnnnnnnnnnnnnnnnnnnnnnnnnnnnnnnnnnnnnnnnnnnnnnnnnnnnnnnnnnnnnnnnnnnnnnnnnnnnnnnnnnnnnnnnnnnnnnnnnnnnnnnnnnnnnnnnnnnnnnnnnnnnnnnnnnnnnnnnnnnnnnnnnnnnnnnnnnnnnnnnnnnnnnnnnnnnnnnnnnnnnnnnnnnnnnnnnnnnnnnnnnnnnnnnnnnnnnnnnnnnnnnnnnnnnnnnnnnnnnnnnnnnnnnnnnnnnnnnnnnnnnnnnnnnnnnnnnnnnnnnnnnnnnnnnnnnnnnnnnnnnnnnnnnnnnnnnnnnnnnnnnnnnnnnnnnnnnnnnnnnnnnnnnnnnnnnnnnnnnnnnnnnnnnnnnnnnnnnnnnnnnnnnnnnnnnnnnnnnnnnnnnnnnnnnnnnnnnnnnnnnnnnnnnnnnnnnnnnnnnnnnnnnnnnnnnnnnnnnnnnnnnnnnnnnnnnnnnnnnnnnnnnnnnnnnnnnnnnnnnnnnnnnnnnnnnnnnnnnnnnnnnnnnnnnnnnnnnnnnnnnnnnnnnnnnnnnnnnnnnnnnnnnnnnnnnnnnnnnnnnnnnnnnnnnnnnnnnnnnnnnnnnnnnnnnnnnnnnnnnnnnnnnnnnnnnnnnnnnnnnnnnnnnnnnnnnnnnnnnnnnnnnnnnnnnnnnnnnnnnnnnnnnnnnnnnnnnnnnnnnnnnnnnnnnnnnnnnnnnnnnnnnnnnnnnnnnnnnnnnnnnnnnnnnnnnnnnnnnnnnnnnnnnnnnnnnnnnnnnnnnnnnnnnnnnnnnnnnnnnnnnnnnnnnnnnnnnnnnnnnnnnnnnnnnnnnnnnnnnnnnnnnnnnnnnnnnnnnnnnnnnnnnnnnnnnnnnnnnnnnnnnnnnnnnnnnnnnnnnnnnnnnnnnnnnnnnnnnnnnnnnnnnnnnnnnnnnnnnnnnnnnnnnnnnnnnnnnnnnnnnnnnnnnnnnnnnnnnnnnnnnnnnnnnnnnnnnnnnnnnnnnnnnnnnnnnnnnnnnnnnnnnnnnnnnnnnnnnnnnnnnnnnnnnnnnnnnnnnnnnnnnnnnnnnnnnnnnnnnnnnnnnnnnnnnnnnnnnnnnnnnnnnnnnnnnnnnnnnnnnnnnnnnnnnnnnnnnnnnnnnnnnnnnnnnnnnnnnnnnnnnnnnnnnnnnnnnnnnnnnnnnnnnnnnnnnnnnnnnnnnnnnnnnnnnnnnnnnnnnnnnnnnnnnnnnnnnnnnnnnnnnnnnnnnnnnnnnnnnnnnnnnnnnnnnnnnnnnnnnnnnnnnnnnnnnnnnnnnnnnnnnnnnnnnnnnnnnnnnnnnnnnnnnnnnnnnnnnnnnnnnnnnnnnnnnnnnnnnnnnnnnnnnnnnnnnnnnnnnnnnnnnnnnnnnnnnnnnnnnnnnnnnnnnnnnnnnnnnnnnnnnnnnnnnnnnnnnnnnnnnnnnnnnnnnnnnnnnnnnnnnnnnnnnnnnnnnnnnnnnnnnnnnnnnnnnnnnnnnnnnnnnnnnnnnnnnnnnnnnnnnnnnnnnnnnnnnnnnnnnnnnnnnnnnnnnnnnnnnnnnnnnnnnnnnnnnnnnnnnnnnnnnnnnnnnnnnnnnnnnnnnnnnnnnnnnnnnnnnnnnnnnnnnnnnnnnnnnnnnnnnnnnnnnnnnnnnnnnnnnnnnnnnnnnnnnnnnnnnnnnnnnnnnnnnnnnnnnnnnnnnnnnnnnnnnnnnnnnnnnnnnnnnnnnnnnnnnnnnnnnnnnnnnnnnnnnnnnnnnnnnnnnnnnnnnnnnnnnnnnnnnnnnnnnnnnnnnnnnnnnnnnnnnnnnnnnnnnnnnnnnnnnnnnnnnnnnnnnnnnnnnnnnnnnnnnnnnnnnnnnnnnnnnnnnnnnnnnnnnnnnnnnnnnnnnnnnnnnnnnnnnnnnnnnnnnnnnnnnnnnnnnnnnnnnnnnnnnnnnnnnnnnnnnnnnnnnnnnnnnnnnnnnnnnnnnnnnnnnnnnnnnnnnnnnnnnnnnnnnnnnnnnnnnnnnnnnnnnnnnnnnnnnnnnnnnnnnnnnnnnnnnnnnnnnnnnnnnnnnnnnnnnnnnnnnnnnnnnnnnnnnnnnnnnnnnnnnnnnnnnnnnnnnnnnnnnnnnnnnnnnnnnnnnnnnnnnnnnnnnnnnnnnnnnnnnnnnnnnnnnnnnnnnnnnnnnnnnnnnnnnnnnnnnnnnnnnnnnnnnnnnnnnnnnnnnnnnnnnnnnnnnnnnnnnnnnnnnnnnnnnnnnnnnnnnnnnnnnnnnnnnnnnnnnnnnnnnnnnnnnnnnnnnnnnnnnnnnnnnnnnnnnnnnnnnnnnnnnnnnnnnnnnnnnnnnnnnnnnnnnnnnnnnnnnnnnnnnnnnnnnnnnnnnnnnnnnnnnnnnnnnnnnnnnnnnnnnnnnnnnnnnnnnnnnnnnnnnnnnnnnnnnnnnnnnnnnnnnnnnnnnnnnnnnnnnnnnnnnnnnnnnnnnnnnnnnnnnnnnnnnnnnnnnnnnnnnnnnnnnnnnnnnnnnnnnnnnnnnnnnnnnnnnnnnnnnnnnnnnnnnnnnnnnnnnnnnnnnnnnnnnnnnnnnnnnnnnnnnnnnnnnnnnnnnnnnnnnnnnnnnnnnnnnnnnnnnnnnnnnnnnnnnnnnnnnnnnnnnnnnnnnnnnnnnnnnnnnnnnnnnnnnnnnnnnnnnnnnnnnnnnnnnnnnnnnnnnnnnnnnnnnnnnnnnnnnnnnnnnnnnnnnnnnnnnnnnnnnnnnnnnnnnnnnnnnnnnnnnnnnnnnnnnnnnnnnnnnnnnnnnnnnnnnnnnnnnnnnnnnnnnnnnnnnnnnnnnnnnnnnnnnnnnnnnnnnnnnnnnnnnnnnnnnnnnnnnnnnnnnnnnnnnnnnnnnnnnnnnnnnnnnnnnnnnnnnnnnnnnnnnnnnnnnnnnnnnnnnnnnnnnnnnnnnnnnnnnnnnnnnnnnnnnnnnnnnnnnnnnnnnnnnnnnnnnnnnnnnnnnnnnnnnnnnnnnnnnnnnnnnnnnnnnnnnnnnnnnnnnnnnnnnnnnnnnnnnnnnnnnnnnnnnnnnnnnnnnnnnnnnnnnnnnnnnnnnnnnnnnnnnnnnnnnnnnnnnnnnnnnnnnnnnnnnnnnnnnnnnnnnnnnnnnnnnnnnnnnnnnnnnnnnnnnnnnnnnnnnnnnnnnnnnnnnnnnnnnnnnnnnnnnnnnnnnnnnnnnnnnnnnnnnnnnnnnnnnnnnnnnnnnnnnnnnnnnnnnnnnnnnnnnnnnnnnnnnnnnnnnnnnnnnnnnnnnnnnnnnnnnnnnnnnnnnnnnnnnnnnnnnnnnnnnnnnnnnnnnnnnnnnnnnnnnnnnnnnnnnnnnnnnnnnnnnnnnnnnnnnnnnnnnnnnnnnnnnnnnnnnnnnnnnnnnnnnnnnnnnnnnnnnnnnnnnnnnnnnnnnnnnnnnnnnnnnnnnnnnnnnnnnnnnnnnnnnnnnnnnnnnnnnnnnnnnnnnnnnnnnnnnnnnnnnnnnnnnnnnnnnnnnnnnnnnnnnnnnnnnnnnnnnnnnnnnnnnnnnnnnnnnnnnnnnnnnnnnnnnnnnnnnnnnnnnnnnnnnnnnnnnnnnnnnnnnnnnnnnnnnnnnnnnnnnnnnnnnnnnnnnnnnnnnnnnnnnnnnnnnnnnnnnnnnnnnnnnnnnnnnnnnnnnnnnnnnnnnnnnnnnnnnnnnnnnnnnnnnnnnnnnnnnnnnnnnnnnnnnnnnnnnnnnnnnnnnnnnnnnnnnnnnnnnnnnnnnnnnnnnnnnnnnnnnnnnnnnnnnnnnnnnnnnnnnnnnnnnnnnnnnnnnnnnnnnnnnnnnnnnnnnnnnnnnnnnnnnnnnnnnnnnnnnnnnnnnnnnnnnnnnnnnnnnnnnnnnnnnnnnnnnnnnnnnnnnnnnnnnnnnnnnnnnnnnnnnnnnnnnnnnnnnnnnnnnnnnnnnnnnnnnnnnnnnnnnnnnnnnnnnnnnnnnnnnnnnnnnnnnnnnnnnnnnnnnnnnnnnnnnnnnnnnnnnnnnnnnnnnnnnnnnnnnnnnnnnnnnnnnnnnnnnnnnnnnnnnnnnnnnnnnnnnnnnnnnnnnnnnnnnnnnnnnnnnnnnnnnnnnnnnnnnnnnnnnnnnnnnnnnnnnnnnnnnnnnnnnnnnnnnnnnnnnnnnnnnnnnnnnnnnnnnnnnnnnnnnnnnnnnnnnnnnnnnnnnnnnnnnnnnnnnnnnnnnnnnnnnnnnnnnnnnnnnnnnnnnnnnnnnnnnnnnnnnnnnnnnnnnnnnnnnnnnnnnnnnnnnnnnnnnnnnnnnnnnnnnnnnnnnnnnnnnnnnnnnnnnnnnnnnnnnnnnnnnnnnnnnnnnnnnnnnnnnnnnnnnnnnnnnnnnnnnnnnnnnnnnnnnnnnnnnnnnnnnnnnnnnnnnnnnnnnnnnnnnnnnnnnnnnnnnnnnnnnnnnnnnnnnnnnnnnnnnnnnnnnnnnnnnnnnnnnnnnnnnnnnnnnnnnnnnnnnnnnnnnnnnnnnnnnnnnnnnnnnnnnnnnnnnnnnnnnnnnnnnnnnnnnnnnnnnnnnnnnnnnnnnnnnnnnnnnnnnnnnnnnnnnnnnnnnnnnnnnnnnnnnnnnnnnnnnnnnnnnnnnnnnnnnnnnnnnnnnnnnnnnnnnnnnnnnnnnnnnnnnnnnnnnnnnnnnnnnnnnnnnnnnnnnnnnnnnnnnnnnnnnnnnnnnnnnnnnnnnnnnnnnnnnnnnnnnnnnnnnnnnnnnnnnnnnnnnnnnnnnnnnnnnnnnnnnnnnnnnnnnnnnnnnnnnnnnnnnnnnnnnnnnnnnnnnnnnnnnnnnnnnnnnnnnnnnnnnnnnnnnnnnnnnnnnnnnnnnnnnnnnnnnnnnnnnnnnnnnnnnnnnnnnnnnnnnnnnnnnnnnnnnnnnnnnnnnnnnnnnnnnnnnnnnnnnnnnnnnnnnnnnnnnnnnnnnnnnnnnnnnnnnnnnnnnnnnnnnnnnnnnnnnnnnnnnnnnnnnnnnnnnnnnnnnnnnnnnnnnnnnnnnnnnnnnnnnnnnnnnnnnnnnnnnnnnnnnnnnnnnnnnnnnnnnnnnnnnnnnnnnnnnnnnnnnnnnnnnnnnnnnnnnnnnnnnnnnnnnnnnnnnnnnnnnnnnnnnnnnnnnnnnnnnnnnnnnnnnnnnnnnnnnnnnnnnnnnnnnnnnnnnnnnnnnnnnnnnnnnnnnnnnnnnnnnnnnnnnnnnnnnnnnnnnnnnnnnnnnnnnnnnnnnnnnnnnnnnnnnnnnnnnnnnnnnnnnnnnnnnnnnnnnnnnnnnnnnnnnnnnnnnnnnnnnnnnnnnnnnnnnnnnnnnnnnnnnnnnnnnnnnnnnnnnnnnnnnnnnnnnnnnnnnnnnnnnnnnnnnnnnnnnnnnnnnnnnnnnnnnnnnnnnnnnnnnnnnnnnnnnnnnnnnnnnnnnnnnnnnnnnnnnnnnnnnnnnnnnnnnnnnnnnnnnnnnnnnnnnnnnnnnnnnnnnnnnnnnnnnnnnnnnnnnnnnnnnnnnnnnnnnnnnnnnnnnnnnnnnnnnnnnnnnnnnnnnnnnnnnnnnnnnnnnnnnnnnnnnnnnnnnnnnnnnnnnnnnnnnnnnnnnnnnnnnnnnnnnnnnnnnnnnnnnnnnnnnnnnnnnnnnnnnnnnnnnnnnnnnnnnnnnnnnnnnnnnnnnnnnnnnnnnnnnnnnnnnnnnnnnnnnnnnnnnnnnnnnnnnnnnnnnnnnnnnnnnnnnnnnnnnnnnnnnnnnnnnnnnnnnnnnnnnnnnnnnnnnnnnnnnnnnnnnnnnnnnnnnnnnnnnnnnnnnnnnnnnnnnnnnnnnnnnnnnnnnnnnnnnnnnnnnnnnnnnnnnnnnnnnnnnnnnnnnnnnnnnnnnnnnnnnnnnnnnnnnnnnnnnnnnnnnnnnnnnnnnnnnnnnnnnnnnnnnnnnnnnnnnnnnnnnnnnnnnnnnnnnnnnnnnnnnnnnnnnnnnnnnnnnnnnnnnnnnnnnnnnnnnnnnnnnnnnnnnnnnnnnnnnnnnnnnnnnnnnnnnnnnnnnnnnnnnnnnnnnnnnnnnnnnnnnnnnnnnnnnnnnnnnnnnnnnnnnnnnnnnnnnnnnnnnnnnnnnnnnnnnnnnnnnnnnnnnnnnnnnnnnnnnnnnnnnnnnnnnnnnnnnnnnnnnnnnnnnnnnnnnnnnnnnnnnnnnnnnnnnnnnnnnnnnnnnnnnnnnnnnnnnnnnnnnnnnnnnnnnnnnnnnnnnnnnnnnnnnnnnnnnnnnnnnnnnnnnnnnnnnnnnnnnnnnnnnnnnnnnnnnnnnnnnnnnnnnnnnnnnnnnnnnnnnnnnnnnnnnnnnnnnnnnnnnnnnnnnnnnnnnnnnnnnnnnnnnnnnnnnnnnnnnnnnnnnnnnnnnnnnnnnnnnnnnnnnnnnnnnnnnnnnnnnnnnnnnnnnnnnnnnnnnnnnnnnnnnnnnnnnnnnnnnnnnnnnnnnnnnnnnnnnnnnnnnnnnnnnnnnnnnnnnnnnnnnnnnnnnnnnnnnnnnnnnnnnnnnnnnnnnnnnnnnnnnnnnnnnnnnnnnnnnnnnnnnnnnnnnnnnnnnnnnnnnnnnnnnnnnnnnnnnnnnnnnnnnnnnnnnnnnnnnnnnnnnnnnnnnnnnnnnnnnnnnnnnnnnnnnnnnnnnnnnnnnnnnnnnnnnnnnnnnnnnnnnnnnnnnnnnnnnnnnnnnnnnnnnnnnnnnnnnnnnnnnnnnnnnnnnnnnnnnnnnnnnnnnnnnnnnnnnnnnnnnnnnnnnnnnnnnnnnnnnnnnnnnnnnnnnnnnnnnnnnnnnnnnnnnnnnnnnnnnnnnnnnnnnnnnnnnnnnnnnnnnnnnnnnnnnnnnnnnnnnnnnnnnnnnnnnnnnnnnnnnnnnnnnnnnnnnnnnnnnnnnnnnnnnnnnnnnnnnnnnnnnnnnnnnnnnnnnnnnnnnnnnnnnnnnnnnnnnnnnnnnnnnnnnnnnnnnnnnnnnnnnnnnnnnnnnnnnnnnnnnnnnnnnnnnnnnnnnnnnnnnnnnnnnnnnnnnnnnnnnnnnnnnnnnnnnnnnnnnnnnnnnnnnnnnnnnnnnnnnnnnnnnnnnnnnnnnnnnnnnnnnnnnnnnnnnnnnnnnnnnnnnnnnnnnnnnnnnnnnnnnnnnnnnnnnnnnnnnnnnnnnnnnnnnnnnnnnnnnnnnnnnnnnnnnnnnnnnnnnnnnnnnnnnnnnnnnnnnnnnnnnnnnnnnnnnnnnnnnnnnnnnnnnnnnnnnnnnnnnnnnnnnnnnnnnnnnnnnnnnnnnnnnnnnnnnnnnnnnnnnnnnnnnnnnnnnnnnnnnnnnnnnnnnnnnnnnnnnnnnnnnnnnnnnnnnnnnnnnnnnnnnnnnnnnnnnnnnnnnnnnnnnnnnnnnnnnnnnnnnnnnnnnnnnnnnnnnnnnnnnnnnnnnnnnnnnnnnnnnnnnnnnnnnnnnnnnnnnnnnnnnnnnnnnnnnnnnnnnnnnnnnnnnnnnnnnnnnnnnnnnnnnnnnnnnnnnnnnnnnnnnnnnnnnnnnnnnnnnnnnnnnnnnnnnnnnnnnnnnnnnnnnnnnnnnnnnnnnnnnnnnnnnnnnnnnnnnnnnnnnnnnnnnnnnnnnnnnnnnnnnnnnnnnnnnnnnnnnnnnnnnnnnnnnnnnnnnnnnnnnnnnnnnnnnnnnnnnnnnnnnnnnnnnnnnnnnnnnnnnnnnnnnnnnnnnnnnnnnnnnnnnnnnnnnnnnnnnnnnnnnnnnnnnnnnnnnnnnnnnnnnnnnnnnnnnnnnnnnnnnnnnnnnnnnnnnnnnnnnnnnnnnnnnnnnnnnnnnnnnnnnnnnnnnnnnnnnnnnnnnnnnnnnnnnnnnnnnnnnnnnnnnnnnnnnnnnnnnnnnnnnnnnnnnnnnnnnnnnnnnnnnnnnnnnnnnnnnnnnnnnnnnnnnnnnnnnnnnnnnnnnnnnnnnnnnnnnnnnnnnnnnnnnnnnnnnnnnnnnnnnnnnnnnnnnnnnnnnnnnnnnnnnnnnnnnnnnnnnnnnnnnnnnnnnnnnnnnnnnnnnnnnnnnnnnnnnnnnnnnnnnnnnnnnnnnnnnnnnnnnnnnnnnnnnnnnnnnnnnnnnnnnnnnnnnnnnnnnnnnnnnnnnnnnnnnnnnnnnnnnnnnnnnnnnnnnnnnnnnnnnnnnnnnnnnnnnnnnnnnnnnnnnnnnnnnnnnnnnnnnnnnnnnnnnnnnnnnnnnnnnnnnnnnnnnnnnnnnnnnnnnnnnnnnnnnnnnnnnnnnnnnnnnnnnnnnnnnnnnnnnnnnnnnnnnnnnnnnnnnnnnnnnnnnnnnnnnnnnnnnnnnnnnnnnnnnnnnnnnnnnnnnnnnnnnnnnnnnnnnnnnnnnnnnnnnnnnnnnnnnnnnnnnnnnnnnnnnnnnnnnnnnnnnnnnnnnnnnnnnnnnnnnnnnnnnnnnnnnnnnnnnnnnnnnnnnnnnnnnnnnnnnnnnnnnnnnnnnnnnnnnnnnnnnnnnnnnnnnnnnnnnnnnnnnnnnnnnnnnnnnnnnnnnnnnnnnnnnnnnnnnnnnnnnnnnnnnnnnnnnnnnnnnnnnnnnnnnnnnnnnnnnnnnnnnnnnnnnnnnnnnnnnnnnnnnnnnnnnnnnnnnnnnnnnnnnnnnnnnnnnnnnnnnnnnnnnnnnnnnnnnnnnnnnnnnnnnnnnnnnnnnnnnnnnnnnnnnnnnnnnnnnnnnnnnnnnnnnnnnnnnnnnnnnnnnnnnnnnnnnnnnnnnnnnnnnnnnnnnnnnnnnnnnnnnnnnnnnnnnnnnnnnnnnnnnnnnnnnnnnnnnnnnnnnnnnnnnnnnnnnnnnnnnnnnnnnnnnnnnnnnnnnnnnnnnnnnnnnnnnnnnnnnnnnnnnnnnnnnnnnnnnnnnnnnnnnnnnnnnnnnnnnnnnnnnnnnnnnnnnnnnnnnnnnnnnnnnnnnnnnnnnnnnnnnnnnnnnnnnnnnnnnnnnnnnnnnnnnnnnnnnnnnnnnnnnnnnnnnnnnnnnnnnnnnnnnnnnnnnnnnnnnnnnnnnnnnnnnnnnnnnnnnnnnnnnnnnnnnnnnnnnnnnnnnnnnnnnnnnnnnnnnnnnnnnnnnnnnnnnnnnnnnnnnnnnnnnnnnnnnnnnnnnnnnnnnnnnnnnnnnnnnnnnnnnnnnnnnnnnnnnnnnnnnnnnnnnnnnnnnnnnnnnnnnnnnnnnnnnnnnnnnnnnnnnnnnnnnnnnnnnnnnnnnnnnnnnnnnnnnnnnnnnnnnnnnnnnnnnnnnnnnnnnnnnnnnnnnnnnnnnnnnnnnnnnnnnnnnnnnnnnnnnnnnnnnnnnnnnnnnnnnnnnnnnnnnnnnnnnnnnnnnnnnnnnnnnnnnnnnnnnnnnnnnnnnnnnnnnnnnnnnnnnnnnnnnnnnnnnnnnnnnnnnnnnnnnnnnnnnnnnnnnnnnnnnnnnnnnnnnnnnnnnnnnnnnnnnnnnnnnnnnnnnnnnnnnnnnnnnnnnnnnnnnnnnnnnnnnnnnnnnnnnnnnnnnnnnnnnnnnnnnnnnnnnnnnnnnnnnnnnnnnnnnnnnnnnnnnnnnnnnnnnnnnnnnnnnnnnnnnnnnnnnnnnnnnnnnnnnnnnnnnnnnnnnnnnnnnnnnnnnnnnnnnnnnnnnnnnnnnnnnnnnnnnnnnnnnnnnnnnnnnnnnnnnnnnnnnnnnnnnnnnnnnnnnnnnnnnnnnnnnnnnnnnnnnnnnnnnnnnnnnnnnnnnnnnnnnnnnnnnnnnnnnnnnnnnnnnnnnnnnnnnnnnnnnnnnnnnnnnnnnnnnnnnnnnnnnnnnnnnnnnnnnnnnnnnnnnnnnnnnnnnnnnnnnnnnnnnnnnnnnnnnnnnnnnnnnnnnnnnnnnnnnnnnnnnnnnnnnnnnnnnnnnnnnnnnnnnnnnnnnnnnnnnnnnnnnnnnnnnnnnnnnnnnnnnnnnnnnnnnnnnnnnnnnnnnnnnnnnnnnnnnnnnnnnnnnnnnnnnnnnnnnnnnnnnnnnnnnnnnnnnnnnnnnnnnnnnnnnnnnnnnnnnnnnnnnnnnnnnnnnnnnnnnnnnnnnnnnnnnnnnnnnnnnnnnnnnnnnnnnnnnnnnnnnnnnnnnnnnnnnnnnnnnnnnnnnnnnnnnnnnnnnnnnnnnnnnnnnnnnnnnnnnnnnnnnnnnnnnnnnnnnnnnnnnnnnnnnnnnnnnnnnnnnnnnnnnnnnnnnnnnnnnnnnnnnnnnnnnnnnnnnnnnnnnnnnnnnnnnnnnnnnnnnnnnnnnnnnnnnnnnnnnnnnnnnnnnnnnnnnnnnnnnnnnnnnnnnnnnnnnnnnnnnnnnnnnnnnnnnnnnnnnnnnnnnnnnnnnnnnnnnnnnnnnnnnnnnnnnnnnnnnnnnnnnnnnnnnnnnnnnnnnnnnnnnnnnnnnnnnnnnnnnnnnnnnnnnnnnnnnnnnnnnnnnnnnnnnnnnnnnnnnnnnnnnnnnnnnnnnnnnnnnnnnnnnnnnnnnnnnnnnnnnnnnnnnnnnnnnnnnnnnnnnnnnnnnnnnnnnnnnnnnnnnnnnnnnnnnnnnnnnnnnnnnnnnnnnnnnnnnnnnnnnnnnnnnnnnnnnnnnnnnnnnnnnnnnnnnnnnnnnnnnnnnnnnnnnnnnnnnnnnnnnnnnnnnnnnnnnnnnnnnnnnnnnnnnnnnnnnnnnnnnnnnnnnnnnnnnnnnnnnnnnnnnnnnnnnnnnnnnnnnnnnnnnnnnnnnnnnnnnnnnnnnnnnnnnnnnnnnnnnnnnnnnnnnnnnnnnnnnnnnnnnnnnnnnnnnnnnnnnnnnnnnnnnnnnnnnnnnnnnnnnnnnnnnnnnnnnnnnnnnnnnnnnnnnnnnnnnnnnnnnnnnnnnnnnnnnnnnnnnnnnnnnnnnnnnnnnnnnnnnnnnnnnnnnnnnnnnnnnnnnnnnnnnnnnnnnnnnnnnnnnnnnnnnnnnnnnnnnnnnnnnnnnnnnnnnnnnnnnnnnnnnnnnnnnnnnnnnnnnnnnnnnnnnnnnnnnnnnnnnnnnnnnnnnnnnnnnnnnnnnnnnnnnnnnnnnnnnnnnnnnnnnnnnnnnnnnnnnnnnnnnnnnnnnnnnnnnnnnnnnnnnnnnnnnnnnnnnnnnnnnnnnnnnnnnnnnnnnnnnnnnnnnnnnnnnnnnnnnnnnnnnnnnnnnnnnnnnnnnnnnnnnnnnnnnnnnnnnnnnnnnnnnnnnnnnnnnnnnnnnnnnnnnnnnnnnnnnnnnnnnnnnnnnnnnnnnnnnnnnnnnnnnnnnnnnnnnnnnnnnnnnnnnnnnnnnnnnnnnnnnnnnnnnnnnnnnnnnnnnnnnnnnnnnnnnnnnnnnnnnnnnnnnnnnnnnnnnnnnnnnnnnnnnnnnnnnnnnnnnnnnnnnnnnnnnnnnnnnnnnnnnnnnnnnnnnnnnnnnnnnnnnnnnnnnnnnnnnnnnnnnnnnnnnnnnnnnnnnnnnnnnnnnnnnnnnnnnnnnnnnnnnnnnnnnnnnnnnnnnnnnnnnnnnnnnnnnnnnnnnnnnnnnnnnnnnnnnnnnnnnnnnnnnnnnnnnnnnnnnnnnnnnnnnnnnnnnnnnnnnnnnnnnnnnnnnnnnnnnnnnnnnnnnnnnnnnnnnnnnnnnnnnnnnnnnnnnnnnnnnnnnnnnnnnnnnnnnnnnnnnnnnnnnnnnnnnnnnnnnnnnnnnnnnnnnnnnnnnnnnnnnnnnnnnnnnnnnnnnnnnnnnnnnnnnnnnnnnnnnnnnnnnnnnnnnnnnnnnnnnnnnnnnnnnnnnnnnnnnnnnnnnnnnnnnnnnnnnnnnnnnnnnnnnnnnnnnnnnnnnnnnnnnnnnnnnnnnnnnnnnnnnnnnnnnnnnnnnnnnnnnnnnnnnnnnnnnnnnnnnnnnnnnnnnnnnnnnnnnnnnnnnnnnnnnnnnnnnnnnnnnnnnnnnnnnnnnnnnnnnnnnnnnnnnnnnnnnnnnnnnnnnnnnnnnnnnnnnnnnnnnnnnnnnnnnnnnnnnnnnnnnnnnnnnnnnnnnnnnnnnnnnnnnnnnnnnnnnnnnnnnnnnnnnnnnnnnnnnnnnnnnnnnnnnnnnnnnnnnnnnnnnnnnnnnnnnnnnnnnnnnnnnnnnnnnnnnnnnnnnnnnnnnnnnnnnnnnnnnnnnnnnnnnnnnnnnnnnnnnnnnnnnnnnnnnnnnnnnnnnnnnnnnnnnnnnnnnnnnnnnnnnnnnnnnnnnnnnnnnnnnnnnnnnnnnnnnnnnnnnnnnnnnnnnnnnnnnnnnnnnnnnnnnnnnnnnnnnnnnnnnnnnnnnnnnnnnnnnnnnnnnnnnnnnnnnnnnnnnnnnnnnnnnnnnnnnnnnnnnnnnnnnnnnnnnnnnnnnnnnnnnnnnnnnnnnnnnnnnnnnnnnnnnnnnnnnnnnnnnnnnnnnnnnnnnnnnnnnnnnnnnnnnnnnnnnnnnnnnnnnnnnnnnnnnnnnnnnnnnnnnnnnnnnnnnnnnnnnnnnnnnnnnnnnnnnnnnnnnnnnnnnnnnnnnnnnnnnnnnnnnnnnnnnnnnnnnnnnnnnnnnnnnnnnnnnnnnnnnnnnnnnnnnnnnnnnnnnnnnnnnnnnnnnnnnnnnnnnnnnnnnnnnnnnnnnnnnnnnnnnnnnnnnnnnnnnnnnnnnnnnnnnnnnnnnnnnnnnnnnnnnnnnnnnnnnnnnnnnnnnnnnnnnnnnnnnnnnnnnnnnnnnnnnnnnnnnnnnnnnnnnnnnnnnnnnnnnnnnnnnnnnnnnnnnnnnnnnnnnnnnnnnnnnnnnnnnnnnnnnnnnnnnnnnnnnnnnnnnnnnnnnnnnnnnnnnnnnnnnnnnnnnnnnnnnnnnnnnnnnnnnnnnnnnnnnnnnnnnnnnnnnnnnnnnnnnnnnnnnnnnnnnnnnnnnnnnnnnnnnnnnnnnnnnnnnnnnnnnnnnnnnnnnnnnnnnnnnnnnnnnnnnnnnnnnnnnnnnnnnnnnnnnnnnnnnnnnnnnnnnnnnnnnnnnnnnnnnnnnnnnnnnnnnnnnnnnnnnnnnnnnnnnnnnnnnnnnnnnnnnnnnnnnnnnnnnnnnnnnnnnnnnnnnnnnnnnnnnnnnnnnnnnnnnnnnnnnnnnnnnnnnnnnnnnnnnnnnnnnnnnnnnnnnnnnnnnnnnnnnnnnnnnnnnnnnnnnnnnnnnnnnnnnnnnnnnnnnnnnnnnnnnnnnnnnnnnnnnnnnnnnnnnnnnnnnnnnnnnnnnnnnnnnnnnnnnnnnnnnnnnnnnnnnnnnnnnnnnnnnnnnnnnnnnnnnnnnnnnnnnnnnnnnnnnnnnnnnnnnnnnnnnnnnnnnnnnnnnnnnnnnnnnnnnnnnnnnnnnnnnnnnnnnnnnnnnnnnnnnnnnnnnnnnnnnnnnnnnnnnnnnnnnnnnnnnnnnnnnnnnnnnnnnnnnnnnnnnnnnnnnnnnnnnnnnnnnnnnnnnnnnnnnnnnnnnnnnnnnnnnnnnnnnnnnnnnnnnnnnnnnnnnnnnnnnnnnnnnnnnnnnnnnnnnnnnnnnnnnnnnnnnnnnnnnnnnnnnnnnnnnnnnnnnnnnnnnnnnnnnnnnnnnnnnnnnnnnnnnnnnnnnnnnnnnnnnnnnnnnnnnnnnnnnnnnnnnnnnnnnnnnnnnnnnnnnnnnnnnnnnnnnnnnnnnnnnnnnnnnnnnnnnnnnnnnnnnnnnnnnnnnnnnnnnnnnnnnnnnnnnnnnnnnnnnnnnnnnnnnnnnnnnnnnnnnnnnnnnnnnnnnnnnnnnnnnnnnnnnnnnnnnnnnnnnnnnnnnnnnnnnnnnnnnnnnnnnnnnnnnnnnnnnnnnnnnnnnnnnnnnnnnnnnnnnnnnnnnnnnnnnnnnnnnnnnnnnnnnnnnnnnnnnnnnnnnnnnnnnnnnnnnnnnnnnnnnnnnnnnnnnnnnnnnnnnnnnnnnnnnnnnnnnnnnnnnnnnnnnnnnnnnnnnnnnnnnnnnnnnnnnnnnnnnnnnnnnnnnnnnnnnnnnnnnnnnnnnnnnnnnnnnnnnnnnnnnnnnnnnnnnnnnnnnnnnnnnnnnnnnnnnnnnnnnnnnnnnnnnnnnnnnnnnnnnnnnnnnnnnnnnnnnnnnnnnnnnnnnnnnnnnnnnnnnnnnnnnnnnnnnnnnnnnnnnnnnnnnnnnnnnnnnnnnnnnnnnnnnnnnnnnnnnnnnnnnnnnnnnnnnnnnnnnnnnnnnnnnnnnnnnnnnnnnnnnnnnnnnnnnnnnnnnnnnnnnnnnnnnnnnnnnnnnnnnnnnnnnnnnnnnnnnnnnnnnnnnnnnnnnnnnnnnnnnnnnnnnnnnnnnnnnnnnnnnnnnnnnnnnnnnnnnnnnnnnnnnnnnnnnnnnnnnnnnnnnnnnnnnnnnnnnnnnnnnnnnnnnnnnnnnnnnnnnnnnnnnnnnnnnnnnnnnnnnnnnnnnnnnnnnnnnnnnnnnnnnnnnnnnnnnnnnnnnnnnnnnnnnnnnnnnnnnnnnnnnnnnnnnnnnnnnnnnnnnnnnnnnnnnnnnnnnnnnnnnnnnnnnnnnnnnnnnnnnnnnnnnnnnnnnnnnnnnnnnnnnnnnnnnnnnnnnnnnnnnnnnnnnnnnnnnnnnnnnnnnnnnnnnnnnnnnnnnnnnnnnnnnnnnnnnnnnnnnnnnnnnnnnnnnnnnnnnnnnnnnnnnnnnnnnnnnnnnnnnnnnnnnnnnnnnnnnnnnnnnnnnnnnnnnnnnnnnnnnnnnnnnnnnnnnnnnnnnnnnnnnnnnnnnnnnnnnnnnnnnnnnnnnnnnnnnnnnnnnnnnnnnnnnnnnnnnnnnnnnnnnnnnnnnnnnnnnnnnnnnnnnnnnnnnnnnnnnnnnnnnnnnnnnnnnnnnnnnnnnnnnnnnnnnnnnnnnnnnnnnnnnnnnnnnnnnnnnnnnnnnnnnnnnnnnnnnnnnnnnnnnnnnnnnnnnnnnnnnnnnnnnnnnnnnnnnnnnnnnnnnnnnnnnnnnnnnnnnnnnnnnnnnnnnnnnnnnnnnnnnnnnnnnnnnnnnnnnnnnnnnnnnnnnnnnnnnnnnnnnnnnnnnnnnnnnnnnnnnnnnnnnnnnnnnnnnnnnnnnnnnnnnnnnnnnnnnnnnnnnnnnnnnnnnnnnnnnnnnnnnnnnnnnnnnnnnnnnnnnnnnnnnnnnnnnnnnnnnnnnnnnnnnnnnnnnnnnnnnnnnnnnnnnnnnnnnnnnnnnnnnnnnnnnnnnnnnnnnnnnnnnnnnnnnnnnnnnnnnnnnnnnnnnnnnnnnnnnnnnnnnnnnnnnnnnnnnnnnnnnnnnnnnnnnnnnnnnnnnnnnnnnnnnnnnnnnnnnnnnnnnnnnnnnnnnnnnnnnnnnnnnnnnnnnnnnnnnnnnnnnnnnnnnnnnnnnnnnnnnnnnnnnnnnnnnnnnnnnnnnnnnnnnnnnnnnnnnnnnnnnnnnnnnnnnnnnnnnnnnnnnnnnnnnnnnnnnnnnnnnnnnnnnnnnnnnnnnnnnnnnnnnnnnnnnnnnnnnnnnnnnnnnnnnnnnnnnnnnnnnnnnnnnnnnnnnnnnnnnnnnnnnnnnnnnnnnnnnnnnnnnnnnnnnnnnnnnnnnnnnnnnnnnnnnnnnnnnnnnnnnnnnnnnnnnnnnnnnnnnnnnnnnnnnnnnnnnnnnnnnnnnnnnnnnnnnnnnnnnnnnnnnnnnnnnnnnnnnnnnnnnnnnnnnnnnnnnnnnnnnnnnnnnnnnnnnnnnnnnnnnnnnnnnnnnnnnnnnnnnnnnnnnnnnnnnnnnnnnnnnnnnnnnnnnnnnnnnnnnnnnnnnnnnnnnnnnnnnnnnnnnnnnnnnnnnnnnnnnnnnnnnnnnnnnnnnnnnnnnnnnnnnnnnnnnnnnnnnnnnnnnnnnnnnnnnnnnnnnnnnnnnnnnnnnnnnnnnnnnnnnnnnnnnnnnnnnnnnnnnnnnnnnnnnnnnnnnnnnnnnnnnnnnnnnnnnnnnnnnnnnnnnnnnnnnnnnnnnnnnnnnnnnnnnnnnnnnnnnnnnnnnnnnnnnnnnnnnnnnnnnnnnnnnnnnnnnnnnnnnnnnnnnnnnnnnnnnnnnnnnnnnnnnnnnnnnnnnnnnnnnnnnnnnnnnnnnnnnnnnnnnnnnnnnnnnnnnnnnnnnnnnnnnnnnnnnnnnnnnnnnnnnnnnnnnnnnnnnnnnnnnnnnnnnnnnnnnnnnnnnnnnnnnnnnnnnnnnnnnnnnnnnnnnnnnnnnnnnnnnnnnnnnnnnnnnnnnnnnnnnnnnnnnnnnnnnnnnnnnnnnnnnnnnnnnnnnnnnnnnnnnnnnnnnnnnnnnnnnnnnnnnnnnnnnnnnnnnnnnnnnnnnnnnnnnnnnnnnnnnnnnnnnnnnnnnnnnnnnnnnnnnnnnnnnnnnnnnnnnnnnnnnnnnnnnnnnnnnnnnnnnnnnnnnnnnnnnnnnnnnnnnnnnnnnnnnnnnnnnnnnnnnnnnnnnnnnnnnnnnnnnnnnnnnnnnnnnnnnnnnnnnnnnnnnnnnnnnnnnnnnnnnnnnnnnnnnnnnnnnnnnnnnnnnnnnnnnnnnnnnnnnnnnnnnnnnnnnnnnnnnnnnnnnnnnnnnnnnnnnnnnnnnnnnnnnnnnnnnnnnnnnnnnnnnnnnnnnnnnnnnnnnnnnnnnnnnnnnnnnnnnnnnnnnnnnnnnnnnnnnnnnnnnnnnnnnnnnnnnnnnnnnnnnnnnnnnnnnnnnnnnnnnnnnnnnnnnnnnnnnnnnnnnnnnnnnnnnnnnnnnnnnnnnnnnnnnnnnnnnnnnnnnnnnnnnnnnnnnnnnnnnnnnnnnnnnnnnnnnnnnnnnnnnnnnnnnnnnnnnnnnnnnnnnnnnnnnnnnnnnnnnnnnnnnnnnnnnnnnnnnnnnnnnnnnnnnnnnnnnnnnnnnnnnnnnnnnnnnnnnnnnnnnnnnnnnnnnnnnnnnnnnnnnnnnnnnnnnnnnnnnnnnnnnnnnnnnnnnnnnnnnnnnnnnnnnnnnnnnnnnnnnnnnnnnnnnnnnnnnnnnnnnnnnnnnnnnnnnnnnnnnnnnnnnnnnnnnnnnnnnnnnnnnnnnnnnnnnnnnnnnnnnnnnnnnnnnnnnnnnnnnnnnnnnnnnnnnnnnnnnnnnnnnnnnnnnnnnnnnnnnnnnnnnnnnnnnnnnnnnnnnnnnnnnnnnnnnnnnnnnnnnnnnnnnnnnnnnnnnnnnnnnnnnnnnnnnnnnnnnnnnnnnnnnnnnnnnnnnnnnnnnnnnnnnnnnnnnnnnnnnnnnnnnnnnnnnnnnnnnnnnnnnnnnnnnnnnnnnnnnnnnnnnnnnnnnnnnnnnnnnnnnnnnnnnnnnnnnnnnnnnnnnnnnnnnnnnnnnnnnnnnnnnnnnnnnnnnnnnnnnnnnnnnnnnnnnnnnnnnnnnnnnnnnnnnnnnnnnnnnnnnnnnnnnnnnnnnnnnnnnnnnnnnnnnnnnnnnnnnnnnnnnnnnnnnnnnnnnnnnnnnnnnnnnnnnnnnnnnnnnnnnnnnnnnnnnnnnnnnnnnnnnnnnnnnnnnnnnnnnnnnnnnnnnnnnnnnnnnnnnnnnnnnnnnnnnnnnnnnnnnnnnnnnnnnnnnnnnnnnnnnnnnnnnnnnnnnnnnnnnnnnnnnnnnnnnnnnnnnnnnnnnnnnnnnnnnnnnnnnnnnnnnnnnnnnnnnnnnnnnnnnnnnnnnnnnnnnnnnnnnnnnnnnnnnnnnnnnnnnnnnnnnnnnnnnnnnnnnnnnnnnnnnnnnnnnnnnnnnnnnnnnnnnnnnnnnnnnnnnnnnnnnnnnnnnnnnnnnnnnnnnnnnnnnnnnnnnnnnnnnnnnnnnnnnnnnnnnnnnnnnnnnnnnnnnnnnnnnnnnnnnnnnnnnnnnnnnnnnnnnnnnnnnnnnnnnnnnnnnnnnnnnnnnnnnnnnnnnnnnnnnnnnnnnnnnnnnnnnnnnnnnnnnnnnnnnnnnnnnnnnnnnnnnnnnnnnnnnnnnnnnnnnnnnnnnnnnnnnnnnnnnnnnnnnnnnnnnnnnnnnnnnnnnnnnnnnnnnnnnnnnnnnnnnnnnnnnnnnnnnnnnnnnnnnnnnnnnnnnnnnnnnnnnnnnnnnnnnnnnnnnnnnnnnnnnnnnnnnnnnnnnnnnnnnnnnnnnnnnnnnnnnnnnnnnnnnnnnnnnnnnnnnnnnnnnnnnnnnnnnnnnnnnnnnnnnnnnnnnnnnnnnnnnnnnnnnnnnnnnnnnnnnnnnnnnnnnnnnnnnnnnnnnnnnnnnnnnnnnnnnnnnnnnnnnnnnnnnnnnnnnnnnnnnnnnnnnnnnnnnnnnnnnnnnnnnnnnnnnnnnnnnnnnnnnnnnnnnnnnnnnnnnnnnnnnnnnnnnnnnnnnnnnnnnnnnnnnnnnnnnnnnnnnnnnnnnnnnnnnnnnnnnnnnnnnnnnnnnnnnnnnnnnnnnnnnnnnnnnnnnnnnnnnnnnnnnnnnnnnnnnnnnnnnnnnnnnnnnnnnnnnnnnnnnnnnnnnnnnnnnnnnnnnnnnnnnnnnnnnnnnnnnnnnnnnnnnnnnnnnnnnnnnnnnnnnnnnnnnnnnnnnnnnnnnnnnnnnnnnnnnnnnnnnnnnnnnnnnnnnnnnnnnnnnnnnnnnnnnnnnnnnnnnnnnnnnnnnnnnnnnnnnnnnnnnnnnnnnnnnnnnnnnnnnnnnnnnnnnnnnnnnnnnnnnnnnnnnnnnnnnnnnnnnnnnnnnnnnnnnnnnnnnnnnnnnnnnnnnnnnnnnnnnnnnnnnnnnnnnnnnnnnnnnnnnnnnnnnnnnnnnnnnnnnnnnnnnnnnnnnnnnnnnnnnnnnnnnnnnnnnnnnnnnnnnnnnnnnnnnnnnnnnnnnnnnnnnnnnnnnnnnnnnnnnnnnnnnnnnnnnnnnnnnnnnnnnnnnnnnnnnnnnnnnnnnnnnnnnnnnnnnnnnnnnnnnnnnnnnnnnnnnnnnnnnnnnnnnnnnnnnnnnnnnnnnnnnnnnnnnnnnnnnnnnnnnnnnnnnnnnnnnnnnnnnnnnnnnnnnnnnnnnnnnnnnnnnnnnnnnnnnnnnnnnnnnnnnnnnnnnnnnnnnnnnnnnnnnnnnnnnnnnnnnnnnnnnnnnnnnnnnnnnnnnnnnnnnnnnnnnnnnnnnnnnnnnnnnnnnnnnnnnnnnnnnnnnnnnnnnnnnnnnnnnnnnnnnnnnnnnnnnnnnnnnnnnnnnnnnnnnnnnnnnnnnnnnnnnnnnnnnnnnnnnnnnnnnnnnnnnnnnnnnnnnnnnnnnnnnnnnnnnnnnnnnnnnnnnnnnnnnnnnnnnnnnnnnnnnnnnnnnnnnnnnnnnnnnnnnnnnnnnnnnnnnnnnnnnnnnnnnnnnnnnnnnnnnnnnnnnnnnnnnnnnnnnnnnnnnnnnnnnnnnnnnnnnnnnnnnnnnnnnnnnnnnnnnnnnnnnnnnnnnnnnnnnnnnnnnnnnnnnnnnnnnnnnnnnnnnnnnnnnnnnnnnnnnnnnnnnnnnnnnnnnnnnnnnnnnnnnnnnnnnnnnnnnnnnnnnnnnnnnnnnnnnnnnnnnnnnnnnnnnnnnnnnnnnnnnnnnnnnnnnnnnnnnnnnnnnnnnnnnnnnnnnnnnnnnnnnnnnnnnnnnnnnnnnnnnnnnnnnnnnnnnnnnnnnnnnnnnnnnnnnnnnnnnnnnnnnnnnnnnnnnnnnnnnnnnnnnnnnnnnnnnnnnnnnnnnnnnnnnnnnnnnnnnnnnnnnnnnnnnnnnnnnnnnnnnnnnnnnnnnnnnnnnnnnnnnnnnnnnnnnnnnnnnnnnnnnnnnnnnnnnnnnnnnnnnnnnnnnnnnnnnnnnnnnnnnnnnnnnnnnnnnnnnnnnnnnnnnnnnnnnnnnnnnnnnnnnnnnnnnnnnnnnnnnnnnnnnnnnnnnnnnnnnnnnnnnnnnnnnnnnnnnnnnnnnnnnnnnnnnnnnnnnnnnnnnnnnnnnnnnnnnnnnnnnnnnnnnnnnnnnnnnnnnnnnnnnnnnnnnnnnnnnnnnnnnnnnnnnnnnnnnnnnnnnnnnnnnnnnnnnnnnnnnnnnnnnnnnnnnnnnnnnnnnnnnnnnnnnnnnnnnnnnnnnnnnnnnnnnnnnnnnnnnnnnnnnnnnnnnnnnnnnnnnnnnnnnnnnnnnnnnnnnnnnnnnnnnnnnnnnnnnnnnnnnnnnnnnnnnnnnnnnnnnnnnnnnnnnnnnnnnnnnnnnnnnnnnnnnnnnnnnnnnnnnnnnnnnnnnnnnnnnnnnnnnnnnnnnnnnnnnnnnnnnnnnnnnnnnnnnnnnnnnnnnnnnnnnnnnnnnnnnnnnnnnnnnnnnnnnnnnnnnnnnnnnnnnnnnnnnnnnnnnnnnnnnnnnnnnnnnnnnnnnnnnnnnnnnnnnnnnnnnnnnnnnnnnnnnnnnnnnnnnnnnnnnnnnnnnnnnnnnnnnnnnnnnnnnnnnnnnnnnnnnnnnnnnnnnnnnnnnnnnnnnnnnnnnnnnnnnnnnnnnnnnnnnnnnnnnnnnnnnnnnnnnnnnnnnnnnnnnnnnnnnnnnnnnnnnnnnnnnnnnnnnnnnnnnnnnnnnnnnnnnnnnnnnnnnnnnnnnnnnnnnnnnnnnnnnnnnnnnnnnnnnnnnnnnnnnnnnnnnnnnnnnnnnnnnnnnnnnnnnnnnnnnnnnnnnnnnnnnnnnnnnnnnnnnnnnnnnnnnnnnnnnnnnnnnnnnnnnnnnnnnnnnnnnnnnnnnnnnnnnnnnnnnnnnnnnnnnnnnnnnnnnnnnnnnnnnnnnnnnnnnnnnnnnnnnnnnnnnnnnnnnnnnnnnnnnnnnnnnnnnnnnnnnnnnnnnnnnnnnnnnnnnnnnnnnnnnnnnnnnnnnnnnnnnnnnnnnnnnnnnnnnnnnnnnnnnnnnnnnnnnnnnnnnnnnnnnnnnnnnnnnnnnnnnnnnnnnnnnnnnnnnnnnnnnnnnnnnnnnnnnnnnnnnnnnnnnnnnnnnnnnnnnnnnnnnnnnnnnnnnnnnnnnnnnnnnnnnnnnnnnnnnnnnnnnnnnnnnnnnnnnnnnnnnnnnnnnnnnnnnnnnnnnnnnnnnnnnnnnnnnnnnnnnnnnnnnnnnnnnnnnnnnnnnnnnnnnnnnnnnnnnnnnnnnnnnnnnnnnnnnnnnnnnnnnnnnnnnnnnnnnnnnnnnnnnnnnnnnnnnnnnnnnnnnnnnnnnnnnnnnnnnnnnnnnnnnnnnnnnnnnnnnnnnnnnnnnnnnnnnnnnnnnnnnnnnnnnnnnnnnnnnnnnnnnnnnnnnnnnnnnnnnnnnnnnnnnnnnnnnnnnnnnnnnnnnnnnnnnnnnnnnnnnnnnnnnnnnnnnnnnnnnnnnnnnnnnnnnnnnnnnnnnnnnnnnnnnnnnnnnnnnnnnnnnnnnnnnnnnnnnnnnnnnnnnnnnnnnnnnnnnnnnnnnnnnnnnnnnnnnnnnnnnnnnnnnnnnnnnnnnnnnnnnnnnnnnnnnnnnnnnnnnnnnnnnnnnnnnnnnnnnnnnnnnnnnnnnnnnnnnnnnnnnnnnnnnnnnnnnnnnnnnnnnnnnnnnnnnnnnnnnnnnnnnnnnnnnnnnnnnnnnnnnnnnnnnnnnnnnnnnnnnnnnnnnnnnnnnnnnnnnnnnnnnnnnnnnnnnnnnnnnnnnnnnnnnnnnnnnnnnnnnnnnnnnnnnnnnnnnnnnnnnnnnnnnnnnnnnnnnnnnnnnnnnnnnnnnnnnnnnnnnnnnnnnnnnnnnnnnnnnnnnnnnnnnnnnnnnnnnnnnnnnnnnnnnnnnnnnnnnnnnnnnnnnnnnnnnnnnnnnnnnnnnnnnnnnnnnnnnnnnnnnnnnnnnnnnnnnnnnnnnnnnnnnnnnnnnnnnnnnnnnnnnnnnnnnnnnnnnnnnnnnnnnnnnnnnnnnnnnnnnnnnnnnnnnnnnnnnnnnnnnnnnnnnnnnnnnnnnnnnnnnnnnnnnnnnnnnnnnnnnnnnnnnnnnnnnnnnnnnnnnnnnnnnnnnnnnnnnnnnnnnnnnnnnnnnnnnnnnnnnnnnnnnnnnnnnnnnnnnnnnnnnnnnnnnnnnnnnnnnnnnnnnnnnnnnnnnnnnnnnnnnnnnnnnnnnnnnnnnnnnnnnnnnnnnnnnnnnnnnnnnnnnnnnnnnnnnnnnnnnnnnnnnnnnnnnnnnnnnnnnnnnnnnnnnnnnnnnnnnnnnnnnnnnnnnnnnnnnnnnnnnnnnnnnnnnnnnnnnnnnnnnnnnnnnnnnnnnnnnnnnnnnnnnnnnnnnnnnnnnnnnnnnnnnnnnnnnnnnnnnnnnnnnnnnnnnnnnnnnnnnnnnnnnnnnnnnnnnnnnnnnnnnnnnnnnnnnnnnnnnnnnnnnnnnnnnnnnnnnnnnnnnnnnnnnnnnnnnnnnnnnnnnnnnnnnnnnnnnnnnnnnnnnnnnnnnnnnnnnnnnnnnnnnnnnnnnnnnnnnnnnnnnnnnnnnnnnnnnnnnnnnnnnnnnnnnnnnnnnnnnnnnnnnnnnnnnnnnnnnnnnnnnnnnnnnnnnnnnnnnnnnnnnnnnnnnnnnnnnnnnnnnnnnnnnnnnnnnnnnnnnnnnnnnnnnnnnnnnnnnnnnnnnnnnnnnnnnnnnnnnnnnnnnnnnnnnnnnnnnnnnnnnnnnnnnnnnnnnnnnnnnnnnnnnnnnnnnnnnnnnnnnnnnnnnnnnnnnnnnnnnnnnnnnnnnnnnnnnnnnnnnnnnnnnnnnnnnnnnnnnnnnnnnnnnnnnnnnnnnnnnnnnnnnnnnnnnnnnnnnnnnnnnnnnnnnnnnnnnnnnnnnnnnnnnnnnnnnnnnnnnnnnnnnnnnnnnnnnnnnnnnnnnnnnnnnnnnnnnnnnnnnnnnnnnnnnnnnnnnnnnnnnnnnnnnnnnnnnnnnnnnnnnnnnnnnnnnnnnnnnnnnnnnnnnnnnnnnnnnnnnnnnnnnnnnnnnnnnnnnnnnnnnnnnnnnnnnnnnnnnnnnnnnnnnnnnnnnnnnnnnnnnnnnnnnnnnnnnnnnnnnnnnnnnnnnnnnnnnnnnnnnnnnnnnnnnnnnnnnnnnnnnnnnnnnnnnnnnnnnnnnnnnnnnnnnnnnnnnnnnnnnnnnnnnnnnnnnnnnnnnnnnnnnnnnnnnnnnnnnnnnnnnnnnnnnnnnnnnnnnnnnnnnnnnnnnnnnnnnnnnnnnnnnnnnnnnnnnnnnnnnnnnnnnnnnnnnnnnnnnnnnnnnnnnnnnnnnnnnnnnnnnnnnnnnnnnnnnnnnnnnnnnnnnnnnnnnnnnnnnnnnnnnnnnnnnnnnnnnnnnnnnnnnnnnnnnnnnnnnnnnnnnnnnnnnnnnnnnnnnnnnnnnnnnnnnnnnnnnnnnnnnnnnnnnnnnnnnnnnnnnnnnnnnnnnnnnnnnnnnnnnnnnnnnnnnnnnnnnnnnnnnnnnnnnnnnnnnnnnnnnnnnnnnnnnnnnnnnnnnnnnnnnnnnnnnnnnnnnnnnnnnnnnnnnnnnnnnnnnnnnnnnnnnnnnnnnnnnnnnnnnnnnnnnnnnnnnnnnnnnnnnnnnnnnnnnnnnnnnnnnnnnnnnnnnnnnnnnnnnnnnnnnnnnnnnnnnnnnnnnnnnnnnnnnnnnnnnnnnnnnnnnnnnnnnnnnnnnnnnnnnnnnnnnnnnnnnnnnnnnnnnnnnnnnnnnnnnnnnnnnnnnnnnnnnnnnnnnnnnnnnnnnnnnnnnnnnnnnnnnnnnnnnnnnnnnnnnnnnnnnnnnnnnnnnnnnnnnnnnnnnnnnnnnnnnnnnnnnnnnnnnnnnnnnnnnnnnnnnnnnnnnnnnnnnnnnnnnnnnnnnnnnnnnnnnnnnnnnnnnnnnnnnnnnnnnnnnnnnnnnnnnnnnnnnnnnnnnnnnnnnnnnnnnnnnnnnnnnnnnnnnnnnnnnnnnnnnnnnnnnnnnnnnnnnnnnnnnnnnnnnnnnnnnnnnnnnnnnnnnnnnnnnnnnnnnnnnnnnnnnnnnnnnnnnnnnnnnnnnnnnnnnnnnnnnnnnnnnnnnnnnnnnnnnnnnnnnnnnnnnnnnnnnnnnnnnnnnnnnnnnnnnnnnnnnnnnnnnnnnnnnnnnnnnnnnnnnnnnnnnnnnnnnnnnnnnnnnnnnnnnnnnnnnnnnnnnnnnnnnnnnnnnnnnnnnnnnnnnnnnnnnnnnnnnnnnnnnnnnnnnnnnnnnnnnnnnnnnnnnnnnnnnnnnnnnnnnnnnnnnnnnnnnnnnnnnnnnnnnnnnnnnnnnnnnnnnnnnnnnnnnnnnnnnnnnnnnnnnnnnnnnnnnnnnnnnnnnnnnnnnnnnnnnnnnnnnnnnnnnnnnnnnnnnnnnnnnnnnnnnnnnnnnnnnnnnnnnnnnnnnnnnnnnnnnnnnnnnnnnnnnnnnnnnnnnnnnnnnnnnnnnnnnnnnnnnnnnnnnnnnnnnnnnnnnnnnnnnnnnnnnnnnnnnnnnnnnnnnnnnnnnnnnnnnnnnnnnnnnnnnnnnnnnnnnnnnnnnnnnnnnnnnnnnnnnnnnnnnnnnnnnnnnnnnnnnnnnnnnnnnnnnnnnnnnnnnnnnnnnnnnnnnnnnnnnnnnnnnnnnnnnnnnnnnnnnnnnnnnnnnnnnnnnnnnnnnnnnnnnnnnnnnnnnnnnnnnnnnnnnnnnnnnnnnnnnnnnnnnnnnnnnnnnnnnnnnnnnnnnnnnnnnnnnnnnnnnnnnnnnnnnnnnnnnnnnnnnnnnnnnnnnnnnnnnnnnnnnnnnnnnnnnnnnnnnnnnnnnnnnnnnnnnnnnnnnnnnnnnnnnnnnnnnnnnnnnnnnnnnnnnnnnnnnnnnnnnnnnnnnnnnnnnnnnnnnnnnnnnnnnnnnnnnnnnnnnnnnnnnnnnnnnnnnnnnnnnnnnnnnnnnnnnnnnnnnnnnnnnnnnnnnnnnnnnnnnnnnnnnnnnnnnnnnnnnnnnnnnnnnnnnnnnnnnnnnnnnnnnnnnnnnnnnnnnnnnnnnnnnnnnnnnnnnnnnnnnnnnnnnnnnnnnnnnnnnnnnnnnnnnnnnnnnnnnnnnnnnnnnnnnnnnnnnnnnnnnnnnnnnnnnnnnnnnnnnnnnnnnnnnnnnnnnnnnnnnnnnnnnnnnnnnnnnnnnnnnnnnnnnnnnnnnnnnnnnnnnnnnnnnnnnnnnnnnnnnnnnnnnnnnnnnnnnnnnnnnnnnnnnnnnnnnnnnnnnnnnnnnnnnnnnnnnnnnnnnnnnnnnnnnnnnnnnnnnnnnnnnnnnnnnnnnnnnnnnnnnnnnnnnnnnnnnnnnnnnnnnnnnnnnnnnnnnnnnnnnnnnnnnnnnnnnnnnnnnnnnnnnnnnnnnnnnnnnnnnnnnnnnnnnnnnnnnnnnnnnnnnnnnnnnnnnnnnnnnnnnnnnnnnnnnnnnnnnnnnnnnnnnnnnnnnnnnnnnnnnnnnnnnnnnnnnnnnnnnnnnnnnnnnnnnnnnnnnnnnnnnnnnnnnnnnnnnnnnnnnnnnnnnnnnnnnnnnnnnnnnnnnnnnnnnnnnnnnnnnnnnnnnnnnnnnnnnnnnnnnnnnnnnnnnnnnnnnnnnnnnnnnnnnnnnnnnnnnnnnnnnnnnnnnnnnnnnnnnnnnnnnnnnnnnnnnnnnnnnnnnnnnnnnnnnnnnnnnnnnnnnnnnnnnnnnnnnnnnnnnnnnnnnnnnnnnnnnnnnnnnnnnnnnnnnnnnnnnnnnnnnnnnnnnnnnnnnnnnnnnnnnnnnnnnnnnnnnnnnnnnnnnnnnnnnnnnnnnnnnnnnnnnnnnnnnnnnnnnnnnnnnnnnnnnnnnnnnnnnnnnnnnnnnnnnnnnnnnnnnnnnnnnnnnnnnnnnnnnnnnnnnnnnnnnnnnnnnnnnnnnnnnnnnnnnnnnnnnnnnnnnnnnnnnnnnnnnnnnnnnnnnnnnnnnnnnnnnnnnnnnnnnnnnnnnnnnnnnnnnnnnnnnnnnnnnnnnnnnnnnnnnnnnnnnnnnnnnnnnnnnnnnnnnnnnnnnnnnnnnnnnnnnnnnnnnnnnnnnnnnnnnnnnnnnnnnnnnnnnnnnnnnnnnnnnnnnnnnnnnnnnnnnnnnnnnnnnnnnnnnnnnnnnnnnnnnnnnnnnnnnnnnnnnnnnnnnnnnnnnnnnnnnnnnnnnnnnnnnnnnnnnnnnnnnnnnnnnnnnnnnnnnnnnnnnnnnnnnnnnnnnnnnnnnnnnnnnnnnnnnnnnnnnnnnnnnnnnnnnnnnnnnnnnnnnnnnnnnnnnnnnnnnnnnnnnnnnnnnnnnnnnnnnnnnnnnnnnnnnnnnnnnnnnnnnnnnnnnnnnnnnnnnnnnnnnnnnnnnnnnnnnnnnnnnnnnnnnnnnnnnnnnnnnnnnnnnnnnnnnnnnnnnnnnnnnnnnnnnnnnnnnnnnnnnnnnnnnnnnnnnnnnnnnnnnnnnnnnnnnnnnnnnnnnnnnnnnnnnnnnnnnnnnnnnnnnnnnnnnnnnnnnnnnnnnnnnnnnnnnnnnnnnnnnnnnnnnnnnnnnnnnnnnnnnnnnnnnnnnnnnnnnnnnnnnnnnnnnnnnnnnnnnnnnnnnnnnnnnnnnnnnnnnnnnnnnnnnnnnnnnnnnnnnnnnnnnnnnnnnnnnnnnnnnnnnnnnnnnnnnnnnnnnnnnnnnnnnnnnnnnnnnnnnnnnnnnnnnnnnnnnnnnnnnnnnnnnnnnnnnnnnnnnnnnnnnnnnnnnnnnnnnnnnnnnnnnnnnnnnnnnnnnnnnnnnnnnnnnnnnnnnnnnnnnnnnnnnnnnnnnnnnnnnnnnnnnnnnnnnnnnnnnnnnnnnnnnnnnnnnnnnnnnnnnnnnnnnnnnnnnnnnnnnnnnnnnnnnnnnnnnnnnnnnnnnnnnnnnnnnnnnnnnnnnnnnnnnnnnnnnnnnnnnnnnnnnnnnnnnnnnnnnnnnnnnnnnnnnnnnnnnnnnnnnnnnnnnnnnnnnnnnnnnnnnnnnnnnnnnnnnnnnnnnnnnnnnnnnnnnnnnnnnnnnnnnnnnnnnnnnnnnnnnnnnnnnnnnnnnnnnnnnnnnnnnnnnnnnnnnnnnnnnnnnnnnnnnnnnnnnnnnnnnnnnnnnnnnnnnnnnnnnnnnnnnnnnnnnnnnnnnnnnnnnnnnnnnnnnnnnnnnnnnnnnnnnnnnnnnnnnnnnnnnnnnnnnnnnnnnnnnnnnnnnnnnnnnnnnnnnnnnnnnnnnnnnnnnnnnnnnnnnnnnnnnnnnnnnnnnnnnnnnnnnnnnnnnnnnnnnnnnnnnnnnnnnnnnnnnnnnnnnnnnnnnnnnnnnnnnnnnnnnnnnnnnnnnnnnnnnnnnnnnnnnnnnnnnnnnnnnnnnnnnnnnnnnnnnnnnnnnnnnnnnnnnnnnnnnnnnnnnnnnnnnnnnnnnnnnnnnnnnnnnnnnnnnnnnnnnnnnnnnnnnnnnnnnnnnnnnnnnnnnnnnnnnnnnnnnnnnnnnnnnnnnnnnnnnnnnnnnnnnnnnnnnnnnnnnnnnnnnnnnnnnnnnnnnnnnnnnnnnnnnnnnnnnnnnnnnnnnnnnnnnnnnnnnnnnnnnnnnnnnnnnnnnnnnnnnnnnnnnnnnnnnnnnnnnnnnnnnnnnnnnnnnnnnnnnnnnnnnnnnnnnnnnnnnnnnnnnnnnnnnnnnnnnnnnnnnnnnnnnnnnnnnnnnnnnnnnnnnnnnnnnnnnnnnnnnnnnnnnnnnnnnnnnnnnnnnnnnnnnnnnnnnnnnnnnnnnnnnnnnnnnnnnnnnnnnnnnnnnnnnnnnnnnnnnnnnnnnnnnnnnnnnnnnnnnnnnnnnnnnnnnnnnnnnnnnnnnnnnnnnnnnnnnnnnnnnnnnnnnnnnnnnnnnnnnnnnnnnnnnnnnnnnnnnnnnnnnnnnnnnnnnnnnnnnnnnnnnnnnnnnnnnnnnnnnnnnnnnnnnnnnnnnnnnnnnnnnnnnnnnnnnnnnnnnnnnnnnnnnnnnnnnnnnnnnnnnnnnnnnnnnnnnnnnnnnnnnnnnnnnnnnnnnnnnnnnnnnnnnnnnnnnnnnnnnnnnnnnnnnnnnnnnnnnnnnnnnnnnnnnnnnnnnnnnnnnnnnnnnnnnnnnnnnnnnnnnnnnnnnnnnnnnnnnnnnnnnnnnnnnnnnnnnnnnnnnnnnnnnnnnnnnnnnnnnnnnnnnnnnnnnnnnnnnnnnnnnnnnnnnnnnnnnnnnnnnnnnnnnnnnnnnnnnnnnnnnnnnnnnnnnnnnnnnnnnnnnnnnnnnnnnnnnnnnnnnnnnnnnnnnnnnnnnnnnnnnnnnnnnnnnnnnnnnnnnnnnnnnnnnnnnnnnnnnnnnnnnnnnnnnnnnnnnnnnnnnnnnnnnnnnnnnnnnnnnnnnnnnnnnnnnnnnnnnnnnnnnnnnnnnnnnnnnnnnnnnnnnnnnnnnnnnnnnnnnnnnnnnnnnnnnnnnnnnnnnnnnnnnnnnnnnnnnnnnnnnnnnnnnnnnnnnnnnnnnnnnnnnnnnnnnnnnnnnnnnnnnnnnnnnnnnnnnnnnnnnnnnnnnnnnnnnnnnnnnnnnnnnnnnnnnnnnnnnnnnnnnnnnnnnnnnnnnnnnnnnnnnnnnnnnnnnnnnnnnnnnnnnnnnnnnnnnnnnnnnnnnnnnnnnnnnnnnnnnnnnnnnnnnnnnnnnnnnnnnnnnnnnnnnnnnnnnnnnnnnnnnnnnnnnnnnnnnnnnnnnnnnnnnnnnnnnnnnnnnnnnnnnnnnnnnnnnnnnnnnnnnnnnnnnnnnnnnnnnnnnnnnnnnnnnnnnnnnnnnnnnnnnnnnnnnnnnnnnnnnnnnnnnnnnnnnnnnnnnnnnnnnnnnnnnnnnnnnnnnnnnnnnnnnnnnnnnnnnnnnnnnnnnnnnnnnnnnnnnnnnnnnnnnnnnnnnnnnnnnnnnnnnnnnnnnnnnnnnnnnnnnnnnnnnnnnnnnnnnnnnnnnnnnnnnnnnnnnnnnnnnnnnnnnnnnnnnnnnnnnnnnnnnnnnnnnnnnnnnnnnnnnnnnnnnnnnnnnnnnnnnnnnnnnnnnnnnnnnnnnnnnnnnnnnnnnnnnnnnnnnnnnnnnnnnnnnnnnnnnnnnnnnnnnnnnnnnnnnnnnnnnnnnnnnnnnnnnnnnnnnnnnnnnnnnnnnnnnnnnnnnnnnnnnnnnnnnnnnnnnnnnnnnnnnnnnnnnnnnnnnnnnnnnnnnnnnnnnnnnnnnnnnnnnnnnnnnnnnnnnnnnnnnnnnnnnnnnnnnnnnnnnnnnnnnnnnnnnnnnnnnnnnnnnnnnnnnnnnnnnnnnnnnnnnnnnnnnnnnnnnnnnnnnnnnnnnnnnnnnnnnnnnnnnnnnnnnnnnnnnnnnnnnnnnnnnnnnnnnnnnnnnnnnnnnnnnnnnnnnnnnnnnnnnnnnnnnnnnnnnnnnnnnnnnnnnnnnnnnnnnnnnnnnnnnnnnnnnnnnnnnnnnnnnnnnnnnnnnnnnnnnnnnnnnnnnnnnnnnnnnnnnnnnnnnnnnnnnnnnnnnnnnnnnnnnnnnnnnnnnnnnnnnnnnnnnnnnnnnnnnnnnnnnnnnnnnnnnnnnnnnnnnnnnnnnnnnnnnnnnnnnnnnnnnnnnnnnnnnnnnnnnnnnnnnnnnnnnnnnnnnnnnnnnnnnnnnnnnnnnnnnnnnnnnnnnnnnnnnnnnnnnnnnnnnnnnnnnnnnnnnnnnnnnnnnnnnnnnnnnnnnnnnnnnnnnnnnnnnnnnnnnnnnnnnnnnnnnnnnnnnnnnnnnnnnnnnnnnnnnnnnnnnnnnnnnnnnnnnnnnnnnnnnnnnnnnnnnnnnnnnnnnnnnnnnnnnnnnnnnnnnnnnnnnnnnnnnnnnnnnnnnnnnnnnnnnnnnnnnnnnnnnnnnnnnnnnnnnnnnnnnnnnnnnnnnnnnnnnnnnnnnnnnnnnnnnnnnnnnnnnnnnnnnnnnnnnnnnnnnnnnnnnnnnnnnnnnnnnnnnnnnnnnnnnnnnnnnnnnnnnnnnnnnnnnnnnnnnnnnnnnnnnnnnnnnnnnnnnnnnnnnnnnnnnnnnnnnnnnnnnnnnnnnnnnnnnnnnnnnnnnnnnnnnnnnnnnnnnnnnnnnnnnnnnnnnnnnnnnnnnnnnnnnnnnnnnnnnnnnnnnnnnnnnnnnnnnnnnnnnnnnnnnnnnnnnnnnnnnnnnnnnnnnnnnnnnnnnnnnnnnnnnnnnnnnnnnnnnnnnnnnnnnnnnnnnnnnnnnnnnnnnnnnnnnnnnnnnnnnnnnnnnnnnnnnnnnnnnnnnnnnnnnnnnnnnnnnnnnnnnnnnnnnnnnnnnnnnnnnnnnnnnnnnnnnnnnnnnnnnnnnnnnnnnnnnnnnnnnnnnnnnnnnnnnnnnnnnnnnnnnnnnnnnnnnnnnnnnnnnnnnnnnnnnnnnnnnnnnnnnnnnnnnnnnnnnnnnnnnnnnnnnnnnnnnnnnnnnnnnnnnnnnnnnnnnnnnnnnnnnnnnnnnnnnnnnnnnnnnnnnnnnnnnnnnnnnnnnnnnnnnnnnnnnnnnnnnnnnnnnnnnnnnnnnnnnnnnnnnnnnnnnnnnnnnnnnnnnnnnnnnnnnnnnnnnnnnnnnnnnnnnnnnnnnnnnnnnnnnnnnnnnnnnnnnnnnnnnnnnnnnnnnnnnnnnnnnnnnnnnnnnnnnnnnnnnnnnnnnnnnnnnnnnnnnnnnnnnnnnnnnnnnnnnnnnnnnnnnnnnnnnnnnnnnnnnnnnnnnnnnnnnnnnnnnnnnnnnnnnnnnnnnnnnnnnnnnnnnnnnnnnnnnnnnnnnnnnnnnnnnnnnnnnnnnnnnnnnnnnnnnnnnnnnnnnnnnnnnnnnnnnnnnnnnnnnnnnnnnnnnnnnnnnnnnnnnnnnnnnnnnnnnnnnnnnnnnnnnnnnnnnnnnnnnnnnnnnnnnnnnnnnnnnnnnnnnnnnnnnnnnnnnnnnnnnnnnnnnnnnnnnnnnnnnnnnnnnnnnnnnnnnnnnnnnnnnnnnnnnnnnnnnnnnnnnnnnnnnnnnnnnnnnnnnnnnnnnnnnnnnnnnnnnnnnnnnnnnnnnnnnnnnnnnnnnnnnnnnnnnnnnnnnnnnnnnnnnnnnnnnnnnnnnnnnnnnnnnnnnnnnnnnnnnnnnnnnnnnnnnnnnnnnnnnnnnnnnnnnnnnnnnnnnnnnnnnnnnnnnnnnnnnnnnnnnnnnnnnnnnnnnnnnnnnnnnnnnnnnnnnnnnnnnnnnnnnnnnnnnnnnnnnnnnnnnnnnnnnnnnnnnnnnnnnnnnnnnnnnnnnnnnnnnnnnnnnnnnnnnnnnnnnnnnnnnnnnnnnnnnnnnnnnnnnnnnnnnnnnnnnnnnnnnnnnnnnnnnnnnnnnnnnnnnnnnnnnnnnnnnnnnnnnnnnnnnnnnnnnnnnnnnnnnnnnnnnnnnnnnnnnnnnnnnnnnnnnnnnnnnnnnnnnnnnnnnnnnnnnnnnnnnnnnnnnnnnnnnnnnnnnnnnnnnnnnnnnnnnnnnnnnnnnnnnnnnnnnnnnnnnnnnnnnnnnnnnnnnnnnnnnnnnnnnnnnnnnnnnnnnnnnnnnnnnnnnnnnnnnnnnnnnnnnnnnnnnnnnnnnnnnnnnnnnnnnnnnnnnnnnnnnnnnnnnnnnnnnnnnnnnnnnnnnnnnnnnnnnnnnnnnnnnnnnnnnnnnnnnnnnnnnnnnnnnnnnnnnnnnnnnnnnnnnnnnnnnnnnnnnnnnnnnnnnnnnnnnnnnnnnnnnnnnnnnnnnnnnnnnnnnnnnnnnnnnnnnnnnnnnnnnnnnnnnnnnnnnnnnnnnnnnnnnnnnnnnnnnnnnnnnnnnnnnnnnnnnnnnnnnnnnnnnnnnnnnnnnnnnnnnnnnnnnnnnnnnnnnnnnnnnnnnnnnnnnnnnnnnnnnnnnnnnnnnnnnnnnnnnnnnnnnnnnnnnnnnnnnnnnnnnnnnnnnnnnnnnnnnnnnnnnnnnnnnnnnnnnnnnnnnnnnnnnnnnnnnnnnnnnnnnnnnnnnnnnnnnnnnnnnnnnnnnnnnnnnnnnnnnnnnnnnnnnnnnnnnnnnnnnnnnnnnnnnnnnnnnnnnnnnnnnnnnnnnnnnnnnnnnnnnnnnnnnnnnnnnnnnnnnnnnnnnnnnnnnnnnnnnnnnnnnnnnnnnnnnnnnnnnnnnnnnnnnnnnnnnnnnnnnnnnnnnnnnnnnnnnnnnnnnnnnnnnnnnnnnnnnnnnnnnnnnnnnnnnnnnnnnnnnnnnnnnnnnnnnnnnnnnnnnnnnnnnnnnnnnnnnnnnnnnnnnnnnnnnnnnnnnnnnnnnnnnnnnnnnnnnnnnnnnnnnnnnnnnnnnnnnnnnnnnnnnnnnnnnnnnnnnnnnnnnnnnnnnnnnnnnnnnnnnnnnnnnnnnnnnnnnnnnnnnnnnnnnnnnnnnnnnnnnnnnnnnnnnnnnnnnnnnnnnnnnnnnnnnnnnnnnnnnnnnnnnnnnnnnnnnnnnnnnnnnnnnnnnnnnnnnnnnnnnnnnnnnnnnnnnnnnnnnnnnnnnnnnnnnnnnnnnnnnnnnnnnnnnnnnnnnnnnnnnnnnnnnnnnnnnnnnnnnnnnnnnnnnnnnnnnnnnnnnnnnnnnnnnnnnnnnnnnnnnnnnnnnnnnnnnnnnnnnnnnnnnnnnnnnnnnnnnnnnnnnnnnnnnnnnnnnnnnnnnnnnnnnnnnnnnnnnnnnnnnnnnnnnnnnnnnnnnnnnnnnnnnnnnnnnnnnnnnnnnnnnnnnnnnnnnnnnnnnnnnnnnnnnnnnnnnnnnnnnnnnnnnnnnnnnnnnnnnnnnnnnnnnnnnnnnnnnnnnnnnnnnnnnnnnnnnnnnnnnnnnnnnnnnnnnnnnnnnnnnnnnnnnnnnnnnnnnnnnnnnnnnnnnnnnnnnnnnnnnnnnnnnnnnnnnnnnnnnnnnnnnnnnnnnnnnnnnnnnnnnnnnnnnnnnnnnnnnnnnnnnnnnnnnnnnnnnnnnnnnnnnnnnnnnnnnnnnnnnnnnnnnnnnnnnnnnnnnnnnnnnnnnnnnnnnnnnnnnnnnnnnnnnnnnnnnnnnnnnnnnnnnnnnnnnnnnnnnnnnnnnnnnnnnnnnnnnnnnnnnnnnnnnnnnnnnnnnnnnnnnnnnnnnnnnnnnnnnnnnnnnnnnnnnnnnnnnnnnnnnnnnnnnnnnnnnnnnnnnnnnnnnnnnnnnnnnnnnnnnnnnnnnnnnnnnnnnnnnnnnnnnnnnnnnnnnnnnnnnnnnnnnnnnnnnnnnnnnnnnnnnnnnnnnnnnnnnnnnnnnnnnnnnnnnnnnnnnnnnnnnnnnnnnnnnnnnnnnnnnnnnnnnnnnnnnnnnnnnnnnnnnnnnnnnnnnnnnnnnnnnnnnnnnnnnnnnnnnnnnnnnnnnnnnnnnnnnnnnnnnnnnnnnnnnnnnnnnnnnnnnnnnnnnnnnnnnnnnnnnnnnnnnnnnnnnnnnnnnnnnnnnnnnnnnnnnnnnnnnnnnnnnnnnnnnnnnnnnnnnnnnnnnnnnnnnnnnnnnnnnnnnnnnnnnnnnnnnnnnnnnnnnnnnnnnnnnnnnnnnnnnnnnnnnnnnnnnnnnnnnnnnnnnnnnnnnnnnnnnnnnnnnnnnnnnnnnnnnnnnnnnnnnnnnnnnnnnnnnnnnnnnnnnnnnnnnnnnnnnnnnnnnnnnnnnnnnnnnnnnnnnnnnnnnnnnnnnnnnnnnnnnnnnnnnnnnnnnnnnnnnnnnnnnnnnnnnnnnnnnnnnnnnnnnnnnnnnnnnnnnnnnnnnnnnnnnnnnnnnnnnnnnnnnnnnnnnnnnnnnnnnnnnnnnnnnnnnnnnnnnnnnnnnnnnnnnnnnnnnnnnnnnnnnnnnnnnnnnnnnnnnnnnnnnnnnnnnnnnnnnnnnnnnnnnnnnnnnnnnnnnnnnnnnnnnnnnnnnnnnnnnnnnnnnnnnnnnnnnnnnnnnnnnnnnnnnnnnnnnnnnnnnnnnnnnnnnnnnnnnnnnnnnnnnnnnnnnnnnnnnnnnnnnnnnnnnnnnnnnnnnnnnnnnnnnnnnnnnnnnnnnnnnnnnnnnnnnnnnnnnnnnnnnnnnnnnnnnnnnnnnnnnnnnnnnnnnnnnnnnnnnnnnnnnnnnnnnnnnnnnnnnnnnnnnnnnnnnnnnnnnnnnnnnnnnnnnnnnnnnnnnnnnnnnnnnnnnnnnnnnnnnnnnnnnnnnnnnnnnnnnnnnnnnnnnnnnnnnnnnnnnnnnnnnnnnnnnnnnnnnnnnnnnnnnnnnnnnnnnnnnnnnnnnnnnnnnnnnnnnnnnnnnnnnnnnnnnnnnnnnnnnnnnnnnnnnnnnnnnnnnnnnnnnnnnnnnnnnnnnnnnnnnnnnnnnnnnnnnnnnnnnnnnnnnnnnnnnnnnnnnnnnnnnnnnnnnnnnnnnnnnnnnnnnnnnnnnnnnnnnnnnnnnnnnnnnnnnnnnnnnnnnnnnnnnnnnnnnnnnnnnnnnnnnnnnnnnnnnnnnnnnnnnnnnnnnnnnnnnnnnnnnnnnnnnnnnnnnnnnnnnnnnnnnnnnnnnnnnnnnnnnnnnnnnnnnnnnnnnnnnnnnnnnnnnnnnnnnnnnnnnnnnnnnnnnnnnnnnnnnnnnnnnnnnnnnnnnnnnnnnnnnnnnnnnnnnnnnnnnnnnnnnnnnnnnnnnnnnnnnnnnnnnnnnnnnnnnnnnnnnnnnnnnnnnnnnnnnnnnnnnnnnnnnnnnnnnnnnnnnnnnnnnnnnnnnnnnnnnnnnnnnnnnnnnnnnnnnnnnnnnnnnnnnnnnnnnnnnnnnnnnnnnnnnnnnnnnnnnnnnnnnnnnnnnnnnnnnnnnnnnnnnnnnnnnnnnnnnnnnnnnnnnnnnnnnnnnnnnnnnnnnnnnnnnnnnnnnnnnnnnnnnnnnnnnnnnnnnnnnnnnnnnnnnnnnnnnnnnnnnnnnnnnnnnnnnnnnnnnnnnnnnnnnnnnnnnnnnnnnnnnnnnnnnnnnnnnnnnnnnnnnnnnnnnnnnnnnnnnnnnnnnnnnnnnnnnnnnnnnnnnnnnnnnnnnnnnnnnnnnnnnnnnnnnnnnnnnnnnnnnnnnnnnnnnnnnnnnnnnnnnnnnnnnnnnnnnnnnnnnnnnnnnnnnnnnnnnnnnnnnnnnnnnnnnnnnnnnnnnnnnnnnnnnnnnnnnnnnnnnnnnnnnnnnnnnnnnnnnnnnnnnnnnnnnnnnnnnnnnnnnnnnnnnnnnnnnnnnnnnnnnnnnnnnnnnnnnnnnnnnnnnnnnnnnnnnnnnnnnnnnnnnnnnnnnnnnnnnnnnnnnnnnnnnnnnnnnnnnnnnnnnnnnnnnnnnnnnnnnnnnnnnnnnnnnnnnnnnnnnnnnnnnnnnnnnnnnnnnnnnnnnnnnnnnnnnnnnnnnnnnnnnnnnnnnnnnnnnnnnnnnnnnnnnnnnnnnnnnnnnnnnnnnnnnnnnnnnnnnnnnnnnnnnnnnnnnnnnnnnnnnnnnnnnnnnnnnnnnnnnnnnnnnnnnnnnnnnnnnnnnnnnnnnnnnnnnnnnnnnnnnnnnnnnnnnnnnnnnnnnnnnnnnnnnnnnnnnnnnnnnnnnnnnnnnnnnnnnnnnnnnnnnnnnnnnnnnnnnnnnnnnnnnnnnnnnnnnnnnnnnnnnnnnnnnnnnnnnnnnnnnnnnnnnnnnnnnnnnnnnnnnnnnnnnnnnnnnnnnnnnnnnnnnnnnnnnnnnnnnnnnnnnnnnnnnnnnnnnnnnnnnnnnnnnnnnnnnnnnnnnnnnnnnnnnnnnnnnnnnnnnnnnnnnnnnnnnnnnnnnnnnnnnnnnnnnnnnnnnnnnnnnnnnnnnnnnnnnnnnnnnnnnnnnnnnnnnnnnnnnnnnnnnnnnnnnnnnnnnnnnnnnnnnnnnnnnnnnnnnnnnnnnnnnnnnnnnnnnnnnnnnnnnnnnnnnnnnnnnnnnnnnnnnnnnnnnnnnnnnnnnnnnnnnnnnnnnnnnnnnnnnnnnnnnnnnnnnnnnnnnnnnnnnnnnnnnnnnnnnnnnnnnnnnnnnnnnnnnnnnnnnnnnnnnnnnnnnnnnnnnnnnnnnnnnnnnnnnnnnnnnnnnnnnnnnnnnnnnnnnnnnnnnnnnnnnnnnnnnnnnnnnnnnnnnnnnnnnnnnnnnnnnnnnnnnnnnnnnnnnnnnnnnnnnnnnnnnnnnnnnnnnnnnnnnnnnnnnnnnnnnnnnnnnnnnnnnnnnnnnnnnnnnnnnnnnnnnnnnnnnnnnnnnnnnnnnnnnnnnnnnnnnnnnnnnnnnnnnnnnnnnnnnnnnnnnnnnnnnnnnnnnnnnnnnnnnnnnnnnnnnnnnnnnnnnnnnnnnnnnnnnnnnnnnnnnnnnnnnnnnnnnnnnnnnnnnnnnnnnnnnnnnnnnnnnnnnnnnnnnnnnnnnnnnnnnnnnnnnnnnnnnnnnnnnnnnnnnnnnnnnnnnnnnnnnnnnnnnnnnnnnnnnnnnnnnnnnnnnnnnnnnnnnnnnnnnnnnnnnnnnnnnnnnnnnnnnnnnnnnnnnnnnnnnnnnnnnnnnnnnnnnnnnnnnnnnnnnnnnnnnnnnnnnnnnnnnnnnnnnnnnnnnnnnnnnnnnnnnnnnnnnnnnnnnnnnnnnnnnnnnnnnnnnnnnnnnnnnnnnnnnnnnnnnnnnnnnnnnnnnnnnnnnnnnnnnnnnnnnnnnnnnnnnnnnnnnnnnnnnnnnnnnnnnnnnnnnnnnnnnnnnnnnnnnnnnnnnnnnnnnnnnnnnnnnnnnnnnnnnnnnnnnnnnnnnnnnnnnnnnnnnnnnnnnnnnnnnnnnnnnnnnnnnnnnnnnnnnnnnnnnnnnnnnnnnnnnnnnnnnnnnnnnnnnnnnnnnnnnnnnnnnnnnnnnnnnnnnnnnnnnnnnnnnnnnnnnnnnnnnnnnnnnnnnnnnnnnnnnnnnnnnnnnnnnnnnnnnnnnnnnnnnnnnnnnnnnnnnnnnnnnnnnnnnnnnnnnnnnnnnnnnnnnnnnnnnnnnnnnnnnnnnnnnnnnnnnnnnnnnnnnnnnnnnnnnnnnnnnnnnnnnnnnnnnnnnnnnnnnnnnnnnnnnnnnnnnnnnnnnnnnnnnnnnnnnnnnnnnnnnnnnnnnnnnnnnnnnnnnnnnnnnnnnnnnnnnnnnnnnnnnnnnnnnnnnnnnnnnnnnnnnnnnnnnnnnnnnnnnnnnnnnnnnnnnnnnnnnnnnnnnnnnnnnnnnnnnnnnnnnnnnnnnnnnnnnnnnnnnnnnnnnnnnnnnnnnnnnnnnnnnnnnnnnnnnnnnnnnnnnnnnnnnnnnnnnnnnnnnnnnnnnnnnnnnnnnnnnnnnnnnnnnnnnnnnnnnnnnnnnnnnnnnnnnnnnnnnnnnnnnnnnnnnnnnnnnnnnnnnnnnnnnnnnnnnnnnnnnnnnnnnnnnnnnnnnnnnnnnnnnnnnnnnnnnnnnnnnnnnnnnnnnnnnnnnnnnnnnnnnnnnnnnnnnnnnnnnnnnnnnnnnnnnnnnnnnnnnnnnnnnnnnnnnnnnnnnnnnnnnnnnnnnnnnnnnnnnnnnnnnnnnnnnnnnnnnnnnnnnnnnnnnnnnnnnnnnnnnnnnnnnnnnnnnnnnnnnnnnnnnnnnnnnnnnnnnnnnnnnnnnnnnnnnnnnnnnnnnnnnnnnnnnnnnnnnnnnnnnnnnnnnnnnnnnnnnnnnnnnnnnnnnnnnnnnnnnnnnnnnnnnnnnnnnnnnnnnnnnnnnnnnnnnnnnnnnnnnnnnnnnnnnnnnnnnnnnnnnnnnnnnnnnnnnnnnnnnnnnnnnnnnnnnnnnnnnnnnnnnnnnnnnnnnnnnnnnnnnnnnnnnnnnnnnnnnnnnnnnnnnnnnnnnnnnnnnnnnnnnnnnnnnnnnnnnnnnnnnnnnnnnnnnnnnnnnnnnnnnnnnnnnnnnnnnnnnnnnnnnnnnnnnnnnnnnnnnnnnnnnnnnnnnnnnnnnnnnnnnnnnnnnnnnnnnnnnnnnnnnnnnnnnnnnnnnnnnnnnnnnnnnnnnnnnnnnnnnnnnnnnnnnnnnnnnnnnnnnnnnnnnnnnnnnnnnnnnnnnnnnnnnnnnnnnnnnnnnnnnnnnnnnnnnnnnnnnnnnnnnnnnnnnnnnnnnnnnnnnnnnnnnnnnnnnnnnnnnnnnnnnnnnnnnnnnnnnnnnnnnnnnnnnnnnnnnnnnnnnnnnnnnnnnnnnnnnnnnnnnnnnnnnnnnnnnnnnnnnnnnnnnnnnnnnnnnnnnnnnnnnnnnnnnnnnnnnnnnnnnnnnnnnnnnnnnnnnnnnnnnnnnnnnnnnnnnnnnnnnnnnnnnnnnnnnnnnnnnnnnnnnnnnnnnnnnnnnnnnnnnnnnnnnnnnnnnnnnnnnnnnnnnnnnnnnnnnnnnnnnnnnnnnnnnnnnnnnnnnnnnnnnnnnnnnnnnnnnnnnnnnnnnnnnnnnnnnnnnnnnnnnnnnnnnnnnnnnnnnnnnnnnnnnnnnnnnnnnnnnnnnnnnnnnnnnnnnnnnnnnnnnnnnnnnnnnnnnnnnnnnnnnnnnnnnnnnnnnnnnnnnnnnnnnnnnnnnnnnnnnnnnnnnnnnnnnnnnnnnnnnnnnnnnnnnnnnnnnnnnnnnnnnnnnnnnnnnnnnnnnnnnnnnnnnnnnnnnnnnnnnnnnnnnnnnnnnnnnnnnnnnnnnnnnnnnnnnnnnnnnnnnnnnnnnnnnnnnnnnnnnnnnnnnnnnnnnnnnnnnnnnnnnnnnnnnnnnnnnnnnnnnnnnnnnnnnnnnnnnnnnnnnnnnnnnnnnnnnnnnnnnnnnnnnnnnnnnnnnnnnnnnnnnnnnnnnnnnnnnnnnnnnnnnnnnnnnnnnnnnnnnnnnnnnnnnnnnnnnnnnnnnnnnnnnnnnnnnnnnnnnnnnnnnnnnnnnnnnnnnnnnnnnnnnnnnnnnnnnnnnnnnnnnnnnnnnnnnnnnnnnnnnnnnnnnnnnnnnnnnnnnnnnnnnnnnnnnnnnnnnnnnnnnnnnnnnnnnnnnnnnnnnnnnnnnnnnnnnnnnnnnnnnnnnnnnnnnnnnnnnnnnnnnnnnnnnnnnnnnnnnnnnnnnnnnnnnnnnnnnnnnnnnnnnnnnnnnnnnnnnnnnnnnnnnnnnnnnnnnnnnnnnnnnnnnnnnnnnnnnnnnnnnnnnnnnnnnnnnnnnnnnnnnnnnnnnnnnnnnnnnnnnnnnnnnnnnnnnnnnnnnnnnnnnnnnnnnnnnnnnnnnnnnnnnnnnnnnnnnnnnnnnnnnnnnnnnnnnnnnnnnnnnnnnnnnnnnnnnnnnnnnnnnnnnnnnnnnnnnnnnnnnnnnnnnnnnnnnnnnnnnnnnnnnnnnnnnnnnnnnnnnnnnnnnnnnnnnnnnnnnnnnnnnnnnnnnnnnnnnnnnnnnnnnnnnnnnnnnnnnnnnnnnnnnnnnnnnnnnnnnnnnnnnnnnnnnnnnnnnnnnnnnnnnnnnnnnnnnnnnnnnnnnnnnnnnnnnnnnnnnnnnnnnnnnnnnnnnnnnnnnnnnnnnnnnnnnnnnnnnnnnnnnnnnnnnnnnnnnnnnnnnnnnnnnnnnnnnnnnnnnnnnnnnnnnnnnnnnnnnnnnnnnnnnnnnnnnnnnnnnnnnnnnnnnnnnnnnnnnnnnnnnnnnnnnnnnnnnnnnnnnnnnnnnnnnnnnnnnnnnnnnnnnnnnnnnnnnnnnnnnnnnnnnnnnnnnnnnnnnnnnnnnnnnnnnnnnnnnnnnnnnnnnnnnnnnnnnnnnnnnnnnnnnnnnnnnnnnnnnnnnnnnnnnnnnnnnnnnnnnnnnnnnnnnnnnnnnnnnnnnnnnnnnnnnnnnnnnnnnnnnnnnnnnnnnnnnnnnnnnnnnnnnnnnnnnnnnnnnnnnnnnnnnnnnnnnnnnnnnnnnnnnnnnnnnnnnnnnnnnnnnnnnnnnnnnnnnnnnnnnnnnnnnnnnnnnnnnnnnnnnnnnnnnnnnnnnnnnnnnnnnnnnnnnnnnnnnnnnnnnnnnnnnnnnnnnnnnnnnnnnnnnnnnnnnnnnnnnnnnnnnnnnnnnnnnnnnnnnnnnnnnnnnnnnnnnnnnnnnnnnnnnnnnnnnnnnnnnnnnnnnnnnnnnnnnnnnnnnnnnnnnnnnnnnnnnnnnnnnnnnnnnnnnnnnnnnnnnnnnnnnnnnnnnnnnnnnnnnnnnnnnnnnnnnnnnnnnnnnnnnnnnnnnnnnnnnnnnnnnnnnnnnnnnnnnnnnnnnnnnnnnnnnnnnnnnnnnnnnnnnnnnnnnnnnnnnnnnnnnnnnnnnnnnnnnnnnnnnnnnnnnnnnnnnnnnnnnnnnnnnnnnnnnnnnnnnnnnnnnnnnnnnnnnnnnnnnnnnnnnnnnnnnnnnnnnnnnnnnnnnnnnnnnnnnnnnnnnnnnnnnnnnnnnnnnnnnnnnnnnnnnnnnnnnnnnnnnnnnnnnnnnnnnnnnnnnnnnnnnnnnnnnnnnnnnnnnnnnnnnnnnnnnnnnnnnnnnnnnnnnnnnnnnnnnnnnnnnnnnnnnnnnnnnnnnnnnnnnnnnnnnnnnnnnnnnnnnnnnnnnnnnnnnnnnnnnnnnnnnnnnnnnnnnnnnnnnnnnnnnnnnnnnnnnnnnnnnnnnnnnnnnnnnnnnnnnnnnnnnnnnnnnnnnnnnnnnnnnnnnnnnnnnnnnnnnnnnnnnnnnnnnnnnnnnnnnnnnnnnnnnnnnnnnnnnnnnnnnnnnnnnnnnnnnnnnnnnnnnnnnnnnnnnnnnnnnnnnnnnnnnnnnnnnnnnnnnnnnnnnnnnnnnnnnnnnnnnnnnnnnnnnnnnnnnnnnnnnnnnnnnnnnnnnnnnnnnnnnnnnnnnnnnnnnnnnnnnnnnnnnnnnnnnnnnnnnnnnnnnnnnnnnnnnnnnnnnnnnnnnnnnnnnnnnnnnnnnnnnnnnnnnnnnnnnnnnnnnnnnnnnnnnnnnnnnnnnnnnnnnnnnnnnnnnnnnnnnnnnnnnnnnnnnnnnnnnnnnnnnnnnnnnnnnnnnnnnnnnnnnnnnnnnnnnnnnnnnnnnnnnnnnnnnnnnnnnnnnnnnnnnnnnnnnnnnnnnnnnnnnnnnnnnnnnnnnnnnnnnnnnnnnnnnnnnnnnnnnnnnnnnnnnnnnnnnnnnnnnnnnnnnnnnnnnnnnnnnnnnnnnnnnnnnnnnnnnnnnnnnnnnnnnnnnnnnnnnnnnnnnnnnnnnnnnnnnnnnnnnnnnnnnnnnnnnnnnnnnnnnnnnnnnnnnnnnnnnnnnnnnnnnnnnnnnnnnnnnnnnnnnnnnnnnnnnnnnnnnnnnnnnnnnnnnnnnnnnnnnnnnnnnnnnnnnnnnnnnnnnnnnnnnnnnnnnnnnnnnnnnnnnnnnnnnnnnnnnnnnnnnnnnnnnnnnnnnnnnnnnnnnnnnnnnnnnnnnnnnnnnnnnnnnnnnnnnnnnnnnnnnnnnnnnnnnnnnnnnnnnnnnnnnnnnnnnnnnnnnnnnnnnnnnnnnnnnnnnnnnnnnnnnnnnnnnnnnnnnnnnnnnnnnnnnnnnnnnnnnnnnnnnnnnnnnnnnnnnnnnnnnnnnnnnnnnnnnnnnnnnnnnnnnnnnnnnnnnnnnnnnnnnnnnnnnnnnnnnnnnnnnnnnnnnnnnnnnnnnnnnnnnnnnnnnnnnnnnnnnnnnnnnnnnnnnnnnnnnnnnnnnnnnnnnnnnnnnnnnnnnnnnnnnnnnnnnnnnnnnnnnnnnnnnnnnnnnnnnnnnnnnnnnnnnnnnnnnnnnnnnnnnnnnnnnnnnnnnnnnnnnnnnnnnnnnnnnnnnnnnnnnnnnnnnnnnnnnnnnnnnnnnnnnnnnnnnnnnnnnnnnnnnnnnnnnnnnnnnnnnnnnnnnnnnnnnnnnnnnnnnnnnnnnnnnnnnnnnnnnnnnnnnnnnnnnnnnnnnnnnnnnnnnnnnnnnnnnnnnnnnnnnnnnnnnnnnnnnnnnnnnnnnnnnnnnnnnnnnnnnnnnnnnnnnnnnnnnnnnnnnnnnnnnnnnnnnnnnnnnnnnnnnnnnnnnnnnnnnnnnnnnnnnnnnnnnnnnnnnnnnnnnnnnnnnnnnnnnnnnnnnnnnnnnnnnnnnnnnnnnnnnnnnnnnnnnnnnnnnnnnnnnnnnnnnnnnnnnnnnnnnnnnnnnnnnnnnnnnnnnnnnnnnnnnnnnnnnnnnnnnnnnnnnnnnnnnnnnnnnnnnnnnnnnnnnnnnnnnnnnnnnnnnnnnnnnnnnnnnnnnnnnnnnnnnnnnnnnnnnnnnnnnnnnnnnnnnnnnnnnnnnnnnnnnnnnnnnnnnnnnnnnnnnnnnnnnnnnnnnnnnnnnnnnnnnnnnnnnnnnnnnnnnnnnnnnnnnnnnnnnnnnnnnnnnnnnnnnnnnnnnnnnnnnnnnnnnnnnnnnnnnnnnnnnnnnnnnnnnnnnnnnnnnnnnnnnnnnnnnnnnnnnnnnnnnnnnnnnnnnnnnnnnnnnnnnnnnnnnnnnnnnnnnnnnnnnnnnnnnnnnnnnnnnnnnnnnnnnnnnnnnnnnnnnnnnnnnnnnnnnnnnnnnnnnnnnnnnnnnnnnnnnnnnnnnnnnnnnnnnnnnnnnnnnnnnnnnnnnnnnnnnnnnnnnnnnnnnnnnnnnnnnnnnnnnnnnnnnnnnnnnnnnnnnnnnnnnnnnnnnnnnnnnnnnnnnnnnnnnnnnnnnnnnnnnnnnnnnnnnnnnnnnnnnnnnnnnnnnnnnnnnnnnnnnnnnnnnnnnnnnnnnnnnnnnnnnnnnnnnnnnnnnnnnnnnnnnnnnnnnnnnnnnnnnnnnnnnnnnnnnnnnnnnnnnnnnnnnnnnnnnnnnnnnnnnnnnnnnnnnnnnnnnnnnnnnnnnnnnnnnnnnnnnnnnnnnnnnnnnnnnnnnnnnnnnnnnnnnnnnnnnnnnnnnnnnnnnnnnnnnnnnnnnnnnnnnnnnnnnnnnnnnnnnnnnnnnnnnnnnnnnnnnnnnnnnnnnnnnnnnnnnnnnnnnnnnnnnnnnnnnnnnnnnnnnnnnnnnnnnnnnnnnnnnnnnnnnnnnnnnnnnnnnnnnnnnnnnnnnnnnnnnnnnnnnnnnnnnnnnnnnnnnnnnnnnnnnnnnnnnnnnnnnnnnnnnnnnnnnnnnnnnnnnnnnnnnnnnnnnnnnnnnnnnnnnnnnnnnnnnnnnnnnnnnnnnnnnnnnnnnnnnnnnnnnnnnnnnnnnnnnnnnnnnnnnnnnnnnnnnnnnnnnnnnnnnnnnnnnnnnnnnnnnnnnnnnnnnnnnnnnnnnnnnnnnnnnnnnnnnnnnnnnnnnnnnnnnnnnnnnnnnnnnnnnnnnnnnnnnnnnnnnnnnnnnnnnnnnnnnnnnnnnnnnnnnnnnnnnnnnnnnnnnnnnnnnnnnnnnnnnnnnnnnnnnnnnnnnnnnnnnnnnnnnnnnnnnnnnnnnnnnnnnnnnnnnnnnnnnnnnnnnnnnnnnnnnnnnnnnnnnnnnnnnnnnnnnnnnnnnnnnnnnnnnnnnnnnnnnnnnnnnnnnnnnnnnnnnnnnnnnnnnnnnnnnnnnnnnnnnnnnnnnnnnnnnnnnnnnnnnnnnnnnnnnnnnnnnnnnnnnnnnnnnnnnnnnnnnnnnnnnnnnnnnnnnnnnnnnnnnnnnnnnnnnnnnnnnnnnnnnnnnnnnnnnnnnnnnnnnnnnnnnnnnnnnnnnnnnnnnnnnnnnnnnnnnnnnnnnnnnnnnnnnnnnnnnnnnnnnnnnnnnnnnnnnnnnnnnnnnnnnnnnnnnnnnnnnnnnnnnnnnnnnnnnnnnnnnnnnnnnnnnnnnnnnnnnnnnnnnnnnnnnnnnnnnnnnnnnnnnnnnnnnnnnnnnnnnnnnnnnnnnnnnnnnnnnnnnnnnnnnnnnnnnnnnnnnnnnnnnnnnnnnnnnnnnnnnnnnnnnnnnnnnnnnnnnnnnnnnnnnnnnnnnnnnnnnnnnnnnnnnnnnnnnnnnnnnnnnnnnnnnnnnnnnnnnnnnnnnnnnnnnnnnnnnnnnnnnnnnnnnnnnnnnnnnnnnnnnnnnnnnnnnnnnnnnnnnnnnnnnnnnnnnnnnnnnnnnnnnnnnnnnnnnnnnnnnnnnnnnnnnnnnnnnnnnnnnnnnnnnnnnnnnnnnnnnnnnnnnnnnnnnnnnnnnnnnnnnnnnnnnnnnnnnnnnnnnnnnnnnnnnnnnnnnnnnnnnnnnnnnnnnnnnnnnnnnnnnnnnnnnnnnnnnnnnnnnnnnnnnnnnnnnnnnnnnnnnnnnnnnnnnnnnnnnnnnnnnnnnnnnnnnnnnnnnnnnnnnnnnnnnnnnnnnnnnnnnnnnnnnnnnnnnnnnnnnnnnnnnnnnnnnnnnnnnnnnnnnnnnnnnnnnnnnnnnnnnnnnnnnnnnnnnnnnnnnnnnnnnnnnnnnnnnnnnnnnnnnnnnnnnnnnnnnnnnnnnnnnnnnnnnnnnnnnnnnnnnnnnnnnnnnnnnnnnnnnnnnnnnnnnnnnnnnnnnnnnnnnnnnnnnnnnnnnnnnnnnnnnnnnnnnnnnnnnnnnnnnnnnnnnnnnnnnnnnnnnnnnnnnnnnnnnnnnnnnnnnnnnnnnnnnnnnnnnnnnnnnnnnnnnnnnnnnnnnnnnnnnnnnnnnnnnnnnnnnnnnnnnnnnnnnnnnnnnnnnnnnnnnnnnnnnnnnnnnnnnnnnnnnnnnnnnnnnnnnnnnnnnnnnnnnnnnnnnnnnnnnnnnnnnnnnnnnnnnnnnnnnnnnnnnnnnnnnnnnnnnnnnnnnnnnnnnnnnnnnnnnnnnnnnnnnnnnnnnnnnnnnnnnnnnnnnnnnnnnnnnnnnnnnnnnnnnnnnnnnnnnnnnnnnnnnnnnnnnnnnnnnnnnnnnnnnnnnnnnnnnnnnnnnnnnnnnnnnnnnnnnnnnnnnnnnnnnnnnnnnnnnnnnnnnnnnnnnnnnnnnnnnnnnnnnnnnnnnnnnnnnnnnnnnnnnnnnnnnnnnnnnnnnnnnnnnnnnnnnnnnnnnnnnnnnnnnnnnnnnnnnnnnnnnnnnnnnnnnnnnnnnnnnnnnnnnnnnnnnnnnnnnnnnnnnnnnnnnnnnnnnnnnnnnnnnnnnnnnnnnnnnnnnnnnnnnnnnnnnnnnnnnnnnnnnnnnnnnnnnnnnnnnnnnnnnnnnnnnnnnnnnnnnnnnnnnnnnnnnnnnnnnnnnnnnnnnnnnnnnnnnnnnnnnnnnnnnnnnnnnnnnnnnnnnnnnnnnnnnnnnnnnnnnnnnnnnnnnnnnnnnnnnnnnnnnnnnnnnnnnnnnnnnnnnnnnnnnnnnnnnnnnnnnnnnnnnnnnnnnnnnnnnnnnnnnnnnnnnnnnnnnnnnnnnnnnnnnnnnnnnnnnnnnnnnnnnnnnnnnnnnnnnnnnnnnnnnnnnnnnnnnnnnnnnnnnnnnnnnnnnnnnnnnnnnnnnnnnnnnnnnnnnnnnnnnnnnnnnnnnnnnnnnnnnnnnnnnnnnnnnnnnnnnnnnnnnnnnnnnnnnnnnnnnnnnnnnnnnnnnnnnnnnnnnnnnnnnnnnnnnnnnnnnnnnnnnnnnnnnnnnnnnnnnnnnnnnnnnnnnnnnnnnnnnnnnnnnnnnnnnnnnnnnnnnnnnnnnnnnnnnnnnnnnnnnnnnnnnnnnnnnnnnnnnnnnnnnnnnnnnnnnnnnnnnnnnnnnnnnnnnnnnnnnnnnnnnnnnnnnnnnnnnnnnnnnnnnnnnnnnnnnnnnnnnnnnnnnnnnnnnnnnnnnnnnnnnnnnnnnnnnnnnnnnnnnnnnnnnnnnnnnnnnnnnnnnnnnnnnnnnnnnnnnnnnnnnnnnnnnnnnnnnnnnnnnnnnnnnnnnnnnnnnnnnnnnnnnnnnnnnnnnnnnnnnnnnnnnnnnnnnnnnnnnnnnnnnnnnnnnnnnnnnnnnnnnnnnnnnnnnnnnnnnnnnnnnnnnnnnnnnnnnnnnnnnnnnnnnnnnnnnnnnnnnnnnnnnnnnnnnnnnnnnnnnnnnnnnnnnnnnnnnnnnnnnnnnnnnnnnnnnnnnnnnnnnnnnnnnnnnnnnnnnnnnnnnnnnnnnnnnnnnnnnnnnnnnnnnnnnnnnnnnnnnnnnnnnnnnnnnnnnnnnnnnnnnnnnnnnnnnnnnnnnnnnnnnnnnnnnnnnnnnnnnnnnnnnnnnnnnnnnnnnnnnnnnnnnnnnnnnnnnnnnnnnnnnnnnnnnnnnnnnnnnnnnnnnnnnnnnnnnnnnnnnnnnnnnnnnnnnnnnnnnnnnnnnnnnnnnnnnnnnnnnnnnnnnnnnnnnnnnnnnnnnnnnnnnnnnnnnnnnnnnnnnnnnnnnnnnnnnnnnnnnnnnnnnnnnnnnnnnnnnnnnnnnnnnnnnnnnnnnnnnnnnnnnnnnnnnnnnnnnnnnnnnnnnnnnnnnnnnnnnnnnnnnnnnnnnnnnnnnnnnnnnnnnnnnnnnnnnnnnnnnnnnnnnnnnnnnnnnnnnnnnnnnnnnnnnnnnnnnnnnnnnnnnnnnnnnnnnnnnnnnnnnnnnnnnnnnnnnnnnnnnnnnnnnnnnnnnnnnnnnnnnnnnnnnnnnnnnnnnnnnnnnnnnnnnnnnnnnnnnnnnnnnnnnnnnnnnnnnnnnnnnnnnnnnnnnnnnnnnnnnnnnnnnnnnnnnnnnnnnnnnnnnnnnnnnnnnnnnnnnnnnnnnnnnnnnnnnnnnnnnnnnnnnnnnnnnnnnnnnnnnnnnnnnnnnnnnnnnnnnnnnnnnnnnnnnnnnnnnnnnnnnnnnnnnnnnnnnnnnnnnnnnnnnnnnnnnnnnnnnnnnnnnnnnnnnnnnnnnnnnnnnnnnnnnnnnnnnnnnnnnnnnnnnnnnnnnnnnnnnnnnnnnnnnnnnnnnnnnnnnnnnnnnnnnnnnnnnnnnnnnnnnnnnnnnnnnnnnnnnnnnnnnnnnnnnnnnnnnnnnnnnnnnnnnnnnnnnnnnnnnnnnnnnnnnnnnnnnnnnnnnnnnnnnnnnnnnnnnnnnnnnnnnnnnnnnnnnnnnnnnnnnnnnnnnnnnnnnnnnnnnnnnnnnnnnnnnnnnnnnnnnnnnnnnnnnnnnnnnnnnnnnnnnnnnnnnnnnnnnnnnnnnnnnnnnnnnnnnnnnnnnnnnnnnnnnnnnnnnnnnnnnnnnnnnnnnnnnnnnnnnnnnnnnnnnnnnnnnnnnnnnnnnnnnnnnnnnnnnnnnnnnnnnnnnnnnnnnnnnnnnnnnnnnnnnnnnnnnnnnnnnnnnnnnnnnnnnnnnnnnnnnnnnnnnnnnnnnnnnnnnnnnnnnnnnnnnnnnnnnnnnnnnnnnnnnnnnnnnnnnnnnnnnnnnnnnnnnnnnnnnnnnnnnnnnnnnnnnnnnnnnnnnnnnnnnnnnnnnnnnnnnnnnnnnnnnnnnnnnnnnnnnnnnnnnnnnnnnnnnnnnnnnnnnnnnnnnnnnnnnnnnnnnnnnnnnnnnnnnnnnnnnnnnnnnnnnnnnnnnnnnnnnnnnnnnnnnnnnnnnnnnnnnnnnnnnnnnnnnnnnnnnnnnnnnnnnnnnnnnnnnnnnnnnnnnnnnnnnnnnnnnnnnnnnnnnnnnnnnnnnnnnnnnnnnnnnnnnnnnnnnnnnnnnnnnnnnnnnnnnnnnnnnnnnnnnnnnnnnnnnnnnnnnnnnnnnnnnnnnnnnnnnnnnnnnnnnnnnnnnnnnnnnnnnnnnnnnnnnnnnnnnnnnnnnnnnnnnnnnnnnnnnnnnnnnnnnnnnnnnnnnnnnnnnnnnnnnnnnnnnnnnnnnnnnnnnnnnnnnnnnnnnnnnnnnnnnnnnnnnnnnnnnnnnnnnnnnnnnnnnnnnnnnnnnnnnnnnnnnnnnnnnnnnnnnnnnnnnnnnnnnnnnnnnnnnnnnnnnnnnnnnnnnnnnnnnnnnnnnnnnnnnnnnnnnnnnnnnnnnnnnnnnnnnnnnnnnnnnnnnnnnnnnnnnnnnnnnnnnnnnnnnnnnnnnnnnnnnnnnnnnnnnnnnnnnnnnnnnnnnnnnnnnnnnnnnnnnnnnnnnnnnnnnnnnnnnnnnnnnnnnnnnnnnnnnnnnnnnnnnnnnnnnnnnnnnnnnnnnnnnnnnnnnnnnnnnnnnnnnnnnnnnnnnnnnnnnnnnnnnnnnnnnnnnnnnnnnnnnnnnnnnnnnnnnnnnnnnnnnnnnnnnnnnnnnnnnnnnnnnnnnnnnnnnnnnnnnnnnnnnnnnnnnnnnnnnnnnnnnnnnnnnnnnnnnnnnnnnnnnnnnnnnnnnnnnnnnnnnnnnnnnnnnnnnnnnnnnnnnnnnnnnnnnnnnnnnnnnnnnnnnnnnnnnnnnnnnnnnnnnnnnnnnnnnnnnnnnnnnnnnnnnnnnnnnnnnnnnnnnnnnnnnnnnnnnnnnnnnnnnnnnnnnnnnnnnnnnnnnnnnnnnnnnnnnnnnnnnnnnnnnnnnnnnnnnnnnnnnnnnnnnnnnnnnnnnnnnnnnnnnnnnnnnnnnnnnnnnnnnnnnnnnnnnnnnnnnnnnnnnnnnnnnnnnnnnnnnnnnnnnnnnnnnnnnnnnnnnnnnnnnnnnnnnnnnnnnnnnnnnnnnnnnnnnnnnnnnnnnnnnnnnnnnnnnnnnnnnnnnnnnnnnnnnnnnnnnnnnnnnnnnnnnnnnnnnnnnnnnnnnnnnnnnnnnnnnnnnnnnnnnnnnnnnnnnnnnnnnnnnnnnnnnnnnnnnnnnnnnnnnnnnnnnnnnnnnnnnnnnnnnnnnnnnnnnnnnnnnnnnnnnnnnnnnnnnnnnnnnnnnnnnnnnnnnnnnnnnnnnnnnnnnnnnnnnnnnnnnnnnnnnnnnnnnnnnnnnnnnnnnnnnnnnnnnnnnnnnnnnnnnnnnnnnnnnnnnnnnnnnnnnnnnnnnnnnnnnnnnnnnnnnnnnnnnnnnnnnnnnnnnnnnnnnnnnnnnnnnnnnnnnnnnnnnnnnnnnnnnnnnnnnnnnnnnnnnnnnnnnnnnnnnnnnnnnnnnnnnnnnnnnnnnnnnnnnnnnnnnnnnnnnnnnnnnnnnnnnnnnnnnnnnnnnnnnnnnnnnnnnnnnnnnnnnnnnnnnnnnnnnnnnnnnnnnnnnnnnnnnnnnnnnnnnnnnnnnnnnnnnnnnnnnnnnnnnnnnnnnnnnnnnnnnnnnnnnnnnnnnnnnnnnnnnnnnnnnnnnnnnnnnnnnnnnnnnnnnnnnnnnnnnnnnnnnnnnnnnnnnnnnnnnnnnnnnnnnnnnnnnnnnnnnnnnnnnnnnnnnnnnnnnnnnnnnnnnnnnnnnnnnnnnnnnnnnnnnnnnnnnnnnnnnnnnnnnnnnnnnnnnnnnnnnnnnnnnnnnnnnnnnnnnnnnnnnnnnnnnnnnnnnnnnnnnnnnnnnnnnnnnnnnnnnnnnnnnnnnnnnnnnnnnnnnnnnnnnnnnnnnnnnnnnnnnnnnnnnnnnnnnnnnnnnnnnnnnnnnnnnnnnnnnnnnnnnnnnnnnnnnnnnnnnnnnnnnnnnnnnnnnnnnnnnnnnnnnnnnnnnnnnnnnnnnnnnnnnnnnnnnnnnnnnnnnnnnnnnnnnnnnnnnnnnnnnnnnnnnnnnnnnnnnnnnnnnnnnnnnnnnnnnnnnnnnnnnnnnnnnnnnnnnnnnnnnnnnnnnnnnnnnnnnnnnnnnnnnnnnnnnnnnnnnnnnnnnnnnnnnnnnnnnnnnnnnnnnnnnnnnnnnnnnnnnnnnnnnnnnnnnnnnnnnnnnnnnnnnnnnnnnnnnnnnnnnnnnnnnnnnnnnnnnnnnnnnnnnnnnnnnnnnnnnnnnnnnnnnnnnnnnnnnnnnnnnnnnnnnnnnnnnnnnnnnnnnnnnnnnnnnnnnnnnnnnnnnnnnnnnnnnnnnnnnnnnnnnnnnnnnnnnnnnnnnnnnnnnnnnnnnnnnnnnnnnnnnnnnnnnnnnnnnnnnnnnnnnnnnnnnnnnnnnnnnnnnnnnnnnnnnnnnnnnnnnnnnnnnnnnnnnnnnnnnnnnnnnnnnnnnnnnnnnnnnnnnnnnnnnnnnnnnnnnnnnnnnnnnnnnnnnnnnnnnnnnnnnnnnnnnnnnnnnnnnnnnnnnnnnnnnnnnnnnnnnnnnnnnnnnnnnnnnnnnnnnnnnnnnnnnnnnnnnnnnnnnnnnnnnnnnnnnnnnnnnnnnnnnnnnnnnnnnnnnnnnnnnnnnnnnnnnnnnnnnnnnnnnnnnnnnnnnnnnnnnnnnnnnnnnnnnnnnnnnnnnnnnnnnnnnnnnnnnnnnnnnnnnnnnnnnnnnnnnnnnnnnnnnnnnnnnnnnnnnnnnnnnnnnnnnnnnnnnnnnnnnnnnnnnnnnnnnnnnnnnnnnnnnnnnnnnnnnnnnnnnnnnnnnnnnnnnnnnnnnnnnnnnnnnnnnnnnnnnnnnnnnnnnnnnnnnnnnnnnnnnnnnnnnnnnnnnnnnnnnnnnnnnnnnnnnnnnnnnnnnnnnnnnnnnnnnnnnnnnnnnnnnnnnnnnnnnnnnnnnnnnnnnnnnnnnnnnnnnnnnnnnnnnnnnnnnnnnnnnnnnnnnnnnnnnnnnnnnnnnnnnnnnnnnnnnnnnnnnnnnnnnnnnnnnnnnnnnnnnnnnnnnnnnnnnnnnnnnnnnnnnnnnnnnnnnnnnnnnnnnnnnnnnnnnnnnnnnnnnnnnnnnnnnnnnnnnnnnnnnnnnnnnnnnnnnnnnnnnnnnnnnnnnnnnnnnnnnnnnnnnnnnnnnnnnnnnnnnnnnnnnnnnnnnnnnnnnnnnnnnnnnnnnnnnnnnnnnnnnnnnnnnnnnnnnnnnnnnnnnnnnnnnnnnnnnnnnnnnnnnnnnnnnnnnnnnnnnnnnnnnnnnnnnnnnnnnnnnnnnnnnnnnnnnnnnnnnnnnnnnnnnnnnnnnnnnnnnnnnnnnnnnnnnnnnnnnnnnnnnnnnnnnnnnnnnnnnnnnnnnnnnnnnnnnnnnnnnnnnnnnnnnnnnnnnnnnnnnnnnnnnnnnnnnnnnnnnnnnnnnnnnnnnnnnnnnnnnnnnnnnnnnnnnnnnnnnnnnnnnnnnnnnnnnnnnnnnnnnnnnnnnnnnnnnnnnnnnnnnnnnnnnnnnnnnnnnnnnnnnnnnnnnnnnnnnnnnnnnnnnnnnnnnnnnnnnnnnnnnnnnnnnnnnnnnnnnnnnnnnnnnnnnnnnnnnnnnnnnnnnnnnnnnnnnnnnnnnnnnnnnnnnnnnnnnnnnnnnnnnnnnnnnnnnnnnnnnnnnnnnnnnnnnnnnnnnnnnnnnnnnnnnnnnnnnnnnnnnnnnnnnnnnnnnnnnnnnnnnnnnnnnnnnnnnnnnnnnnnnnnnnnnnnnnnnnnnnnnnnnnnnnnnnnnnnnnnnnnnnnnnnnnnnnnnnnnnnnnnnnnnnnnnnnnnnnnnnnnnnnnnnnnnnnnnnnnnnnnnnnnnnnnnnnnnnnnnnnnnnnnnnnnnnnnnnnnnnnnnnnnnnnnnnnnnnnnnnnnnnnnnnnnnnnnnnnnnnnnnnnnnnnnnnnnnnnnnnnnnnnnnnnnnnnnnnnnnnnnnnnnnnnnnnnnnnnnnnnnnnnnnnnnnnnnnnnnnnnnnnnnnnnnnnnnnnnnnnnnnnnnnnnnnnnnnnnnnnnnnnnnnnnnnnnnnnnnnnnnnnnnnnnnnnnnnnnnnnnnnnnnnnnnnnnnnnnnnnnnnnnnnnnnnnnnnnnnnnnnnnnnnnnnnnnnnnnnnnnnnnnnnnnnnnnnnnnnnnnnnnnnnnnnnnnnnnnnnnnnnnnnnnnnnnnnnnnnnnnnnnnnnnnnnnnnnnnnnnnnnnnnnnnnnnnnnnnnnnnnnnnnnnnnnnnnnnnnnnnnnnnnnnnnnnnnnnnnnnnnnnnnnnnnnnnnnnnnnnnnnnnnnnnnnnnnnnnnnnnnnnnnnnnnnnnnnnnnnnnnnnnnnnnnnnnnnnnnnnnnnnnnnnnnnnnnnnnnnnnnnnnnnnnnnnnnnnnnnnnnnnnnnnnnnnnnnnnnnnnnnnnnnnnnnnnnnnnnnnnnnnnnnnnnnnnnnnnnnnnnnnnnnnnnnnnnnnnnnnnnnnnnnnnnnnnnnnnnnnnnnnnnnnnnnnnnnnnnnnnnnnnnnnnnnnnnnnnnnnnnnnnnnnnnnnnnnnnnnnnnnnnnnnnnnnnnnnnnnnnnnnnnnnnnnnnnnnnnnnnnnnnnnnnnnnnnnnnnnnnnnnnnnnnnnnnnnnnnnnnnnnnnnnnnnnnnnnnnnnnnnnnnnnnnnnnnnnnnnnnnnnnnnnnnnnnnnnnnnnnnnnnnnnnnnnnnnnnnnnnnnnnnnnnnnnnnnnnnnnnnnnnnnnnnnnnnnnnnnnnnnnnnnnnnnnnnnnnnnnnnnnnnnnnnnnnnnnnnnnnnnnnnnnnnnnnnnnnnnnnnnnnnnnnnnnnnnnnnnnnnnnnnnnnnnnnnnnnnnnnnnnnnnnnnnnnnnnnnnnnnnnnnnnnnnnnnnnnnnnnnnnnnnnnnnnnnnnnnnnnnnnnnnnnnnnnnnnnnnnnnnnnnnnnnnnnnnnnnnnnnnnnnnnnnnnnnnnnnnnnnnnnnnnnnnnnnnnnnnnnnnnnnnnnnnnnnnnnnnnnnnnnnnnnnnnnnnnnnnnnnnnnnnnnnnnnnnnnnnnnnnnnnnnnnnnnnnnnnnnnnnnnnnnnnnnnnnnnnnnnnnnnnnnnnnnnnnnnnnnnnnnnnnnnnnnnnnnnnnnnnnnnnnnnnnnnnnnnnnnnnnnnnnnnnnnnnnnnnnnnnnnnnnnnnnnnnnnnnnnnnnnnnnnnnnnnnnnnnnnnnnnnnnnnnnnnnnnnnnnnnnnnnnnnnnnnnnnnnnnnnnnnnnnnnnnnnnnnnnnnnnnnnnnnnnnnnnnnnnnnnnnnnnnnnnnnnnnnnnnnnnnnnnnnnnnnnnnnnnnnnnnnnnnnnnnnnnnnnnnnnnnnnnnnnnnnnnnnnnnnnnnnnnnnnnnnnnnnnnnnnnnnnnnnnnnnnnnnnnnnnnnnnnnnnnnnnnnnnnnnnnnnnnnnnnnnnnnnnnnnnnnnnnnnnnnnnnnnnnnnnnnnnnnnnnnnnnnnnnnnnnnnnnnnnnnnnnnnnnnnnnnnnnnnnnnnnnnnnnnnnnnnnnnnnnnnnnnnnnnnnnnnnnnnnnnnnnnnnnnnnnnnnnnnnnnnnnnnnnnnnnnnnnnnnnnnnnnnnnnnnnnnnnnnnnnnnnnnnnnnnnnnnnnnnnnnnnnnnnnnnnnnnnnnnnnnnnnnnnnnnnnnnnnnnnnnnnnnnnnnnnnnnnnnnnnnnnnnnnnnnnnnnnnnnnnnnnnnnnnnnnnnnnnnnnnnnnnnnnnnnnnnnnnnnnnnnnnnnnnnnnnnnnnnnnnnnnnnnnnnnnnnnnnnnnnnnnnnnnnnnnnnnnnnnnnnnnnnnnnnnnnnnnnnnnnnnnnnnnnnnnnnnnnnnnnnnnnnnnnnnnnnnnnnnnnnnnnnnnnnnnnnnnnnnnnnnnnnnnnnnnnnnnnnnnnnnnnnnnnnnnnnnnnnnnnnnnnnnnnnnnnnnnnnnnnnnnnnnnnnnnnnnnnnnnnnnnnnnnnnnnnnnnnnnnnnnnnnnnnnnnnnnnnnnnnnnnnnnnnnnnnnnnnnnnnnnnnnnnnnnnnnnnnnnnnnnnnnnnnnnnnnnnnnnnnnnnnnnnnnnnnnnnnnnnnnnnnnnnnnnnnnnnnnnnnnnnnnnnnnnnnnnnnnnnnnnnnnnnnnnnnnnnnnnnnnnnnnnnnnnnnnnnnnnnnnnnnnnnnnnnnnnnnnnnnnnnnnnnnnnnnnnnnnnnnnnnnnnnnnnnnnnnnnnnnnnnnnnnnnnnnnnnnnnnnnnnnnnnnnnnnnnnnnnnnnnnnnnnnnnnnnnnnnnnnnnnnnnnnnnnnnnnnnnnnnnnnnnnnnnnnnnnnnnnnnnnnnnnnnnnnnnnnnnnnnnnnnnnnnnnnnnnnnnnnnnnnnnnnnnnnnnnnnnnnnnnnnnnnnnnnnnnnnnnnnnnnnnnnnnnnnnnnnnnnnnnnnnnnnnnnnnnnnnnnnnnnnnnnnnnnnnnnnnnnnnnnnnnnnnnnnnnnnnnnnnnnnnnnnnnnnnnnnnnnnnnnnnnnnnnnnnnnnnnnnnnnnnnnnnnnnnnnnnnnnnnnnnnnnnnnnnnnnnnnnnnnnnnnnnnnnnnnnnnnnnnnnnnnnnnnnnnnnnnnnnnnnnnnnnnnnnnnnnnnnnnnnnnnnnnnnnnnnnnnnnnnnnnnnnnnnnnnnnnnnnnnnnnnnnnnnnnnnnnnnnnnnnnnnnnnnnnnnnnnnnnnnnnnnnnnnnnnnnnnnnnnnnnnnnnnnnnnnnnnnnnnnnnnnnnnnnnnnnnnnnnnnnnnnnnnnnnnnnnnnnnnnnnnnnnnnnnnnnnnnnnnnnnnnnnnnnnnnnnnnnnnnnnnnnnnnnnnnnnnnnnnnnnnnnnnnnnnnnnnnnnnnnnnnnnnnnnnnnnnnnnnnnnnnnnnnnnnnnnnnnnnnnnnnnnnnnnnnnnnnnnnnnnnnnnnnnnnnnnnnnnnnnnnnnnnnnnnnnnnnnnnnnnnnnnnnnnnnnnnnnnnnnnnnnnnnnnnnnnnnnnnnnnnnnnnnnnnnnnnnnnnnnnnnnnnnnnnnnnnnnnnnnnnnnnnnnnnnnnnnnnnnnnnnnnnnnnnnnnnnnnnnnnnnnnnnnnnnnnnnnnnnnnnnnnnnnnnnnnnnnnnnnnnnnnnnnnnnnnnnnnnnnnnnnnnnnnnnnnnnnnnnnnnnnnnnnnnnnnnnnnnnnnnnnnnnnnnnnnnnnnnnnnnnnnnnnnnnnnnnnnnnnnnnnnnnnnnnnnnnnnnnnnnnnnnnnnnnnnnnnnnnnnnnnnnnnnnnnnnnnnnnnnnnnnnnnnnnnnnnnnnnnnnnnnnnnnnnnnnnnnnnnnnnnnnnnnnnnnnnnnnnnnnnnnnnnnnnnnnnnnnnnnnnnnnnnnnnnnnnnnnnnnnnnnnnnnnnnnnnnnnnnnnnnnnnnnnnnnnnnnnnnnnnnnnnnnnnnnnnnnnnnnnnnnnnnnnnnnnnnnnnnnnnnnnnnnnnnnnnnnnnnnnnnnnnnnnnnnnnnnnnnnnnnnnnnnnnnnnnnnnnnnnnnnnnnnnnnnnnnnnnnnnnnnnnnnnnnnnnnnnnnnnnnnnnnnnnnnnnnnnnnnnnnnnnnnnnnnnnnnnnnnnnnnnnnnnnnnnnnnnnnnnnnnnnnnnnnnnnnnnnnnnnnnnnnnnnnnnnnnnnnnnnnnnnnnnnnnnnnnnnnnnnnnnnnnnnnnnnnnnnnnnnnnnnnnnnnnnnnnnnnnnnnnnnnnnnnnnnnnnnnnnnnnnnnnnnnnnnnnnnnnnnnnnnnnnnnnnnnnnnnnnnnnnnnnnnnnnnnnnnnnnnnnnnnnnnnnnnnnnnnnnnnnnnnnnnnnnnnnnnnnnnnnnnnnnnnnnnnnnnnnnnnnnnnnnnnnnnnnnnnnnnnnnnnnnnnnnnnnnnnnnnnnnnnnnnnnnnnnnnnnnnnnnnnnnnnnnnnnnnnnnnnnnnnnnnnnnnnnnnnnnnnnnnnnnnnnnnnnnnnnnnnnnnnnnnnnnnnnnnnnnnnnnnnnnnnnnnnnnnnnnnnnnnnnnnnnnnnnnnnnnnnnnnnnnnnnnnnnnnnnnnnnnnnnnnnnnnnnnnnnnnnnnnnnnnnnnnnnnnnnnnnnnnnnnnnnnnnnnnnnnnnnnnnnnnnnnnnnnnnnnnnnnnnnnnnnnnnnnnnnnnnnnnnnnnnnnnnnnnnnnnnnnnnnnnnnnnnnnnnnnnnnnnnnnnnnnnnnnnnnnnnnnnnnnnnnnnnnnnnnnnnnnnnnnnnnnnnnnnnnnnnnnnnnnnnnnnnnnnnnnnnnnnnnnnnnnnnnnnnnnnnnnnnnnnnnnnnnnnnnnnnnnnnnnnnnnnnnnnnnnnnnnnnnnnnnnnnnnnnnnnnnnnnnnnnnnnnnnnnnnnnnnnnnnnnnnnnnnnnnnnnnnnnnnnnnnnnnnnnnnnnnnnnnnnnnnnnnnnnnnnnnnnnnnnnnnnnnnnnnnnnnnnnnnnnnnnnnnnnnnnnnnnnnnnnnnnnnnnnnnnnnnnnnnnnnnnnnnnnnnnnnnnnnnnnnnnnnnnnnnnnnnnnnnnnnnnnnnnnnnnnnnnnnnnnnnnnnnnnnnnnnnnnnnnnnnnnnnnnnnnnnnnnnnnnnnnnnnnnnnnnnnnnnnnnnnnnnnnnnnnnnnnnnnnnnnnnnnnnnnnnnnnnnnnnnnnnnnnnnnnnnnnnnnnnnnnnnnnnnnnnnnnnnnnnnnnnnnnnnnnnnnnnnnnnnnnnnnnnnnnnnnnnnnnnnnnnnnnnnnnnnnnnnnnnnnnnnnnnnnnnnnnnnnnnnnnnnnnnnnnnnnnnnnnnnnnnnnnnnnnnnnnnnnnnnnnnnnnnnnnnnnnnnnnnnnnnnnnnnnnnnnnnnnnnnnnnnnnnnnnnnnnnnnnnnnnnnnnnnnnnnnnnnnnnnnnnnnnnnnnnnnnnnnnnnnnnnnnnnnnnnnnnnnnnnnnnnnnnnnnnnnnnnnnnnnnnnnnnnnnnnnnnnnnnnnnnnnnnnnnnnnnnnnnnnnnnnnnnnnnnnnnnnnnnnnnnnnnnnnnnnnnnnnnnnnnnnnnnnnnnnnnnnnnnnnnnnnnnnnnnnnnnnnnnnnnnnnnnnnnnnnnnnnnnnnnnnnnnnnnnnnnnnnnnnnnnnnnnnnnnnnnnnnnnnnnnnnnnnnnnnnnnnnnnnnnnnnnnnnnnnnnnnnnnnnnnnnnnnnnnnnnnnnnnnnnnnnnnnnnnnnnnnnnnnnnnnnnnnnnnnnnnnnnnnnnnnnnnnnnnnnnnnnnnnnnnnnnnnnnnnnnnnnnnnnnnnnnnnnnnnnnnnnnnnnnnnnnnnnnnnnnnnnnnnnnnnnnnnnnnnnnnnnnnnnnnnnnnnnnnnnnnnnnnnnnnnnnnnnnnnnnnnnnnnnnnnnnnnnnnnnnnnnnnnnnnnnnnnnnnnnnnnnnnnnnnnnnnnnnnnnnnnnnnnnnnnnnnnnnnnnnnnnnnnnnnnnnnnnnnnnnnnnnnnnnnnnnnnnnnnnnnnnnnnnnnnnnnnnnnnnnnnnnnnnnnnnnnnnnnnnnnnnnnnnnnnnnnnnnnnnnnnnnnnnnnnnnnnnnnnnnnnnnnnnnnnnnnnnnnnnnnnnnnnnnnnnnnnnnnnnnnnnnnnnnnnnnnnnnnnnnnnnnnnnnnnnnnnnnnnnnnnnnnnnnnnnnnnnnnnnnnnnnnnnnnnnnnnnnnnnnnnnnnnnnnnnnnnnnnnnnnnnnnnnnnnnnnnnnnnnnnnnnnnnnnnnnnnnnnnnnnnnnnnnnnnnnnnnnnnnnnnnnnnnnnnnnnnnnnnnnnnnnnnnnnnnnnnnnnnnnnnnnnnnnnnnnnnnnnnnnnnnnnnnnnnnnnnnnnnnnnnnnnnnnnnnnnnnnnnnnnnnnnnnnnnnnnnnnnnnnnnnnnnnnnnnnnnnnnnnnnnnnnnnnnnnnnnnnnnnnnnnnnnnnnnnnnnnnnnnnnnnnnnnnnnnnnnnnnnnnnnnnnnnnnnnnnnnnnnnnnnnnnnnnnnnnnnnnnnnnnnnnnnnnnnnnnnnnnnnnnnnnnnnnnnnnnnnnnnnnnnnnnnnnnnnnnnnnnnnnnnnnnnnnnnnnnnnnnnnnnnnnnnnnnnnnnnnnnnnnnnnnnnnnnnnnnnnnnnnnnnnnnnnnnnnnnnnnnnnnnnnnnnnnnnnnnnnnnnnnnnnnnnnnnnnnnnnnnnnnnnnnnnnnnnnnnnnnnnnnnnnnnnnnnnnnnnnnnnnnnnnnnnnnnnnnnnnnnnnnnnnnnnnnnnnnnnnnnnnnnnnnnnnnnnnnnnnnnnnnnnnnnnnnnnnnnnnnnnnnnnnnnnnnnnnnnnnnnnnnnnnnnnnnnnnnnnnnnnnnnnnnnnnnnnnnnnnnnnnnnnnnnnnnnnnnnnnnnnnnnnnnnnnnnnnnnnnnnnnnnnnnnnnnnnnnnnnnnnnnnnnnnnnnnnnnnnnnnnnnnnnnnnnnnnnnnnnnnnnnnnnnnnnnnnnnnnnnnnnnnnnnnnnnnnnnnnnnnnnnnnnnnnnnnnnnnnnnnnnnnnnnnnnnnnnnnnnnnnnnnnnnnnnnnnnnnnnnnnnnnnnnnnnnnnnnnnnnnnnnnnnnnnnnnnnnnnnnnnnnnnnnnnnnnnnnnnnnnnnnnnnnnnnnnnnnnnnnnnnnnnnnnnnnnnnnnnnnnnnnnnnnnnnnnnnnnnnnnnnnnnnnnnnnnnnnnnnnnnnnnnnnnnnnnnnnnnnnnnnnnnnnnnnnnnnnnnnnnnnnnnnnnnnnnnnnnnnnnnnnnnnnnnnnnnnnnnnnnnnnnnnnnnnnnnnnnnnnnnnnnnnnnnnnnnnnnnnnnnnnnnnnnnnnnnnnnnnnnnnnnnnnnnnnnnnnnnnnnnnnnnnnnnnnnnnnnnnnnnnnnnnnnnnnnnnnnnnnnnnnnnnnnnnnnnnnnnnnnnnnnnnnnnnnnnnnnnnnnnnnnnnnnnnnnnnnnnnnnnnnnnnnnnnnnnnnnnnnnnnnnnnnnnnnnnnnnnnnnnnnnnnnnnnnnnnnnnnnnnnnnnnnnnnnnnnnnnnnnnnnnnnnnnnnnnnnnnnnnnnnnnnnnnnnnnnnnnnnnnnnnnnnnnnnnnnnnnnnnnnnnnnnnnnnnnnnnnnnnnnnnnnnnnnnnnnnnnnnnnnnnnnnnnnnnnnnnnnnnnnnnnnnnnnnnnnnnnnnnnnnnnnnnnnnnnnnnnnnnnnnnnnnnnnnnnnnnnnnnnnnnnnnnnnnnnnnnnnnnnnnnnnnnnnnnnnnnnnnnnnnnnnnnnnnnnnnnnnnnnnnnnnnnnnnnnnnnnnnnnnnnnnnnnnnnnnnnnnnnnnnnnnnnnnnnnnnnnnnnnnnnnnnnnnnnnnnnnnnnnnnnnnnnnnnnnnnnnnnnnnnnnnnnnnnnnnnnnnnnnnnnnnnnnnnnnnnnnnnnnnnnnnnnnnnnnnnnnnnnnnnnnnnnnnnnnnnnnnnnnnnnnnnnnnnnnnnnnnnnnnnnnnnnnnnnnnnnnnnnnnnnnnnnnnnnnnnnnnnnnnnnnnnnnnnnnnnnnnnnnnnnnnnnnnnnnnnnnnnnnnnnnnnnnnnnnnnnnnnnnnnnnnnnnnnnnnnnnnnnnnnnnnnnnnnnnnnnnnnnnnnnnnnnnnnnnnnnnnnnnnnnnnnnnnnnnnnnnnnnnnnnnnnnnnnnnnnnnnnnnnnnnnnnnnnnnnnnnnnnnnnnnnnnnnnnnnnnnnnnnnnnnnnnnnnnnnnnnnnnnnnnnnnnnnnnnnnnnnnnnnnnnnnnnnnnnnnnnnnnnnnnnnnnnnnnnnnnnnnnnnnnnnnnnnnnnnnnnnnnnnnnnnnnnnnnnnnnnnnnnnnnnnnnnnnnnnnnnnnnnnnnnnnnnnnnnnnnnnnnnnnnnnnnnnnnnnnnnnnnnnnnnnnnnnnnnnnnnnnnnnnnnnnnnnnnnnnnnnnnnnnnnnnnnnnnnnnnnnnnnnnnnnnnnnnnnnnnnnnnnnnnnnnnnnnnnnnnnnnnnnnnnnnnnnnnnnnnnnnnnnnnnnnnnnnnnnnnnnnnnnnnnnnnnnnnnnnnnnnnnnnnnnnnnnnnnnnnnnnnnnnnnnnnnnnnnnnnnnnnnnnnnnnnnnnnnnnnnnnnnnnnnnnnnnnnnnnnnnnnnnnnnnnnnnnnnnnnnnnnnnnnnnnnnnnnnnnnnnnnnnnnnnnnnnnnnnnnnnnnnnnnnnnnnnnnnnnnnnnnnnnnnnnnnnnnnnnnnnnnnnnnnnnnnnnnnnnnnnnnnnnnnnnnnnnnnnnnnnnnnnnnnnnnnnnnnnnnnnnnnnnnnnnnnnnnnnnnnnnnnnnnnnnnnnnnnnnnnnnnnnnnnnnnnnnnnnnnnnnnnnnnnnnnnnnnnnnnnnnnnnnnnnnnnnnnnnnnnnnnnnnnnnnnnnnnnnnnnnnnnnnnnnnnnnnnnnnnnnnnnnnnnnnnnnnnnnnnnnnnnnnnnnnnnnnnnnnnnnnnnnnnnnnnnnnnnnnnnnnnnnnnnnnnnnnnnnnnnnnnnnnnnnnnnnnnnnnnnnnnnnnnnnnnnnnnnnnnnnnnnnnnnnnnnnnnnnnnnnnnnnnnnnnnnnnnnnnnnnnnnnnnnnnnnnnnnnnnnnnnnnnnnnnnnnnnnnnnnnnnnnnnnnnnnnnnnnnnnnnnnnnnnnnnnnnnnnnnnnnnnnnnnnnnnnnnnnnnnnnnnnnnnnnnnnnnnnnnnnnnnnnnnnnnnnnnnnnnnnnnnnnnnnnnnnnnnnnnnnnnnnnnnnnnnnnnnnnnnnnnnnnnnnnnnnnnnnnnnnnnnnnnnnnnnnnnnnnnnnnnnnnnnnnnnnnnnnnnnnnnnnnnnnnnnnnnnnnnnnnnnnnnnnnnnnnnnnnnnnnnnnnnnnnnnnnnnnnnnnnnnnnnnnnnnnnnnnnnnnnnnnnnnnnnnnnnnnnnnnnnnnnnnnnnnnnnnnnnnnnnnnnnnnnnnnnnnnnnnnnnnnnnnnnnnnnnnnnnnnnnnnnnnnnnnnnnnnnnnnnnnnnnnnnnnnnnnnnnnnnnnnnnnnnnnnnnnnnnnnnnnnnnnnnnnnnnnnnnnnnnnnnnnnnnnnnnnnnnnnnnnnnnnnnnnnnnnnnnnnnnnnnnnnnnnnnnnnnnnnnnnnnnnnnnnnnnnnnnnnnnnnnnnnnnnnnnnnnnnnnnnnnnnnnnnnnnnnnnnnnnnnnnnnnnnnnnnnnnnnnnnnnnnnnnnnnnnnnnnnnnnnnnnnnnnnnnnnnnnnnnnnnnnnnnnnnnnnnnnnnnnnnnnnnnnnnnnnnnnnnnnnnnnnnnnnnnnnnnnnnnnnnnnnnnnnnnnnnnnnnnnnnnnnnnnnnnnnnnnnnnnnnnnnnnnnnnnnnnnnnnnnnnnnnnnnnnnnnnnnnnnnnnnnnnnnnnnnnnnnnnnnnnnnnnnnnnnnnnnnnnnnnnnnnnnnnnnnnnnnnnnnnnnnnnnnnnnnnnnnnnnnnnnnnnnnnnnnnnnnnnnnnnnnnnnnnnnnnnnnnnnnnnnnnnnnnnnnnnnnnnnnnnnnnnnnnnnnnnnnnnnnnnnnnnnnnnnnnnnnnnnnnnnnnnnnnnnnnnnnnnnnnnnnnnnnnnnnnnnnnnnnnnnnnnnnnnnnnnnnnnnnnnnnnnnnnnnnnnnnnnnnnnnnnnnnnnnnnnnnnnnnnnnnnnnnnnnnnnnnnnnnnnnnnnnnnnnnnnnnnnnnnnnnnnnnnnnnnnnnnnnnnnnnnnnnnnnnnnnnnnnnnnnnnnnnnnnnnnnnnnnnnnnnnnnnnnnnnnnnnnnnnnnnnnnnnnnnnnnnnnnnnnnnnnnnnnnnnnnnnnnnnnnnnnnnnnnnnnnnnnnnnnnnnnnnnnnnnnnnnnnnnnnnnnnnnnnnnnnnnnnnnnnnnnnnnnnnnnnnnnnnnnnnnnnnnnnnnnnnnnnnnnnnnnnnnnnnnnnnnnnnnnnnnnnnnnnnnnnnnnnnnnnnnnnnnnnnnnnnnnnnnnnnnnnnnnnnnnnnnnnnnnnnnnnnnnnnnnnnnnnnnnnnnnnnnnnnnnnnnnnnnnnnnnnnnnnnnnnnnnnnnnnnnnnnnnnnnnnnnnnnnnnnnnnnnnnnnnnnnnnnnnnnnnnnnnnnnnnnnnnnnnnnnnnnnnnnnnnnnnnnnnnnnnnnnnnnnnnnnnnnnnnnnnnnnnnnnnnnnnnnnnnnnnnnnnnnnnnnnnnnnnnnnnnnnnnnnnnnnnnnnnnnnnnnnnnnnnnnnnnnnnnnnnnnnnnnnnnnnnnnnnnnnnnnnnnnnnnnnnnnnnnnnnnnnnnnnnnnnnnnnnnnnnnnnnnnnnnnnnnnnnnnnnnnnnnnnnnnnnnnnnnnnnnnnnnnnnnnnnnnnnnnnnnnnnnnnnnnnnnnnnnnnnnnnnnnnnnnnnnnnnnnnnnnnnnnnnnnnnnnnnnnnnnnnnnnnnnnnnnnnnnnnnnnnnnnnnnnnnnnnnnnnnnnnnnnnnnnnnnnnnnnnnnnnnnnnnnnnnnnnnnnnnnnnnnnnnnnnnnnnnnnnnnnnnnnnnnnnnnnnnnnnnnnnnnnnnnnnnnnnnnnnnnnnnnnnnnnnnnnnnnnnnnnnnnnnnnnnnnnnnnnnnnnnnnnnnnnnnnnnnnnnnnnnnnnnnnnnnnnnnnnnnnnnnnnnnnnnnnnnnnnnnnnnnnnnnnnnnnnnnnnnnnnnnnnnnnnnnnnnnnnnnnnnnnnnnnnnnnnnnnnnnnnnnnnnnnnnnnnnnnnnnnnnnnnnnnnnnnnnnnnnnnnnnnnnnnnnnnnnnnnnnnnnnnnnnnnnnnnnnnnnnnnnnnnnnnnnnnnnnnnnnnnnnnnnnnnnnnnnnnnnnnnnnnnnnnnnnnnnnnnnnnnnnnnnnnnnnnnnnnnnnnnnnnnnnnnnnnnnnnnnnnnnnnnnnnnnnnnnnnnnnnnnnnnnnnnnnnnnnnnnnnnnnnnnnnnnnnnnnnnnnnnnnnnnnnnnnnnnnnnnnnnnnnnnnnnnnnnnnnnnnnnnnnnnnnnnnnnnnnnnnnnnnnnnnnnnnnnnnnnnnnnnnnnnnnnnnnnnnnnnnnnnnnnnnnnnnnnnnnnnnnnnnnnnnnnnnnnnnnnnnnnnnnnnnnnnnnnnnnnnnnnnnnnnnnnnnnnnnnnnnnnnnnnnnnnnnnnnnnnnnnnnnnnnnnnnnnnnnnnnnnnnnnnnnnnnnnnnnnnnnnnnnnnnnnnnnnnnnnnnnnnnnnnnnnnnnnnnnnnnnnnnnnnnnnnnnnnnnnnnnnnnnnnnnnnnnnnnnnnnnnnnnnnnnnnnnnnnnnnnnnnnnnnnnnnnnnnnnnnnnnnnnnnnnnnnnnnnnnnnnnnnnnnnnnnnnnnnnnnnnnnnnnnnnnnnnnnnnnnnnnnnnnnnnnnnnnnnnnnnnnnnnnnnnnnnnnnnnnnnnnnnnnnnnnnnnnnnnnnnnnnnnnnnnnnnnnnnnnnnnnnnnnnnnnnnnnnnnnnnnnnnnnnnnnnnnnnnnnnnnnnnnnnnnnnnnnnnnnnnnnnnnnnnnnnnnnnnnnnnnnnnnnnnnnnnnnnnnnnnnnnnnnnnnnnnnnnnnnnnnnnnnnnnnnnnnnnnnnnnnnnnnnnnnnnnnnnnnnnnnnnnnnnnnnnnnnnnnnnnnnnnnnnnnnnnnnnnnnnnnnnnnnnnnnnnnnnnnnnnnnnnnnnnnnnnnnnnnnnnnnnnnnnnnnnnnnnnnnnnnnnnnnnnnnnnnnnnnnnnnnnnnnnnnnnnnnnnnnnnnnnnnnnnnnnnnnnnnnnnnnnnnnnnnnnnnnnnnnnnnnnnnnnnnnnnnnnnnnnnnnnnnnnnnnnnnnnnnnnnnnnnnnnnnnnnnnnnnnnnnnnnnnnnnnnnnnnnnnnnnnnnnnnnnnnnnnnnnnnnnnnnnnnnnnnnnnnnnnnnnnnnnnnnnnnnnnnnnnnnnnnnnnnnnnnnnnnnnnnnnnnnnnnnnnnnnnnnnnnnnnnnnnnnnnnnnnnnnnnnnnnnnnnnnnnnnnnnnnnnnnnnnnnnnnnnnnnnnnnnnnnnnnnnnnnnnnnnnnnnnnnnnnnnnnnnnnnnnnnnnnnnnnnnnnnnnnnnnnnnnnnnnnnnnnnnnnnnnnnnnnnnnnnnnnnnnnnnnnnnnnnnnnnnnnnnnnnnnnnnnnnnnnnnnnnnnnnnnnnnnnnnnnnnnnnnnnnnnnnnnnnnnnnnnnnnnnnnnnnnnnnnnnnnnnnnnnnnnnnnnnnnnnnnnnnnnnnnnnnnnnnnnnnnnnnnnnnnnnnnnnnnnnnnnnnnnnnnnnnnnnnnnnnnnnnnnnnnnnnnnnnnnnnnnnnnnnnnnnnnnnnnnnnnnnnnnnnnnnnnnnnnnnnnnnnnnnnnnnnnnnnnnnnnnnnnnnnnnnnnnnnnnnnnnnnnnnnnnnnnnnnnnnnnnnnnnnnnnnnnnnnnnnnnnnnnnnnnnnnnnnnnnnnnnnnnnnnnnnnnnnnnnnnnnnnnnnnnnnnnnnnnnnnnnnnnnnnnnnnnnnnnnnnnnnnnnnnnnnnnnnnnnnnnnnnnnnnnnnnnnnnnnnnnnnnnnnnnnnnnnnnnnnnnnnnnnnnnnnnnnnnnnnnnnnnnnnnnnnnnnnnnnnnnnnnnnnnnnnnnnnnnnnnnnnnnnnnnnnnnnnnnnnnnnnnnnnnnnnnnnnnnnnnnnnnnnnnnnnnnnnnnnnnnnnnnnnnnnnnnnnnnnnnnnnnnnnnnnnnnnnnnnnnnnnnnnnnnnnnnnnnnnnnnnnnnnnnnnnnnnnnnnnnnnnnnnnnnnnnnnnnnnnnnnnnnnnnnnnnnnnnnnnnnnnnnnnnnnnnnnnnnnnnnnnnnnnnnnnnnnnnnnnnnnnnnnnnnnnnnnnnnnnnnnnnnnnnnnnnnnnnnnnnnnnnnnnnnnnnnnnnnnnnnnnnnnnnnnnnnnnnnnnnnnnnnnnnnnnnnnnnnnnnnnnnnnnnnnnnnnnnnnnnnnnnnnnnnnnnnnnnnnnnnnnnnnnnnnnnnnnnnnnnnnnnnnnnnnnnnnnnnnnnnnnnnnnnnnnnnnnnnnnnnnnnnnnnnnnnnnnnnnnnnnnnnnnnnnnnnnnnnnnnnnnnnnnnnnnnnnnnnnnnnnnnnnnnnnnnnnnnnnnnnnnnnnnnnnnnnnnnnnnnnnnnnnnnnnnnnnnnnnnnnnnnnnnnnnnnnnnnnnnnnnnnnnnnnnnnnnnnnnnnnnnnnnnnnnnnnnnnnnnnnnnnnnnnnnnnnnnnnnnnnnnnnnnnnnnnnnnnnnnnnnnnnnnnnnnnnnnnnnnnnnnnnnnnnnnnnnnnnnnnnnnnnnnnnnnnnnnnnnnnnnnnnnnnnnnnnnnnnnnnnnnnnnnnnnnnnnnnnnnnnnnnnnnnnnnnnnnnnnnnnnnnnnnnnnnnnnnnnnnnnnnnnnnnnnnnnnnnnnnnnnnnnnnnnnnnnnnnnnnnnnnnnnnnnnnnnnnnnnnnnnnnnnnnnnnnnnnnnnnnnnnnnnnnnnnnnnnnnnnnnnnnnnnnnnnnnnnnnnnnnnnnnnnnnnnnnnnnnnnnnnnnnnnnnnnnnnnnnnnnnnnnnnnnnnnnnnnnnnnnnnnnnnnnnnnnnnnnnnnnnnnnnnnnnnnnnnnnnnnnnnnnnnnnnnnnnnnnnnnnnnnnnnnnnnnnnnnnnnnnnnnnnnnnnnnnnnnnnnnnnnnnnnnnnnnnnnnnnnnnnnnnnnnnnnnnnnnnnnnnnnnnnnnnnnnnnnnnnnnnnnnnnnnnnnnnnnnnnnnnnnnnnnnnnnnnnnnnnnnnnnnnnnnnnnnnnnnnnnnnnnnnnnnnnnnnnnnnnnnnnnnnnnnnnnnnnnnnnnnnnnnnnnnnnnnnnnnnnnnnnnnnnnnnnnnnnnnnnnnnnnnnnnnnnnnnnnnnnnnnnnnnnnnnnnnnnnnnnnnnnnnnnnnnnnnnnnnnnnnnnnnnnnnnnnnnnnnnnnnnnnnnnnnnnnnnnnnnnnnnnnnnnnnnnnnnnnnnnnnnnnnnnnnnnnnnnnnnnnnnnnnnnnnnnnnnnnnnnnnnnnnnnnnnnnnnnnnnnnnnnnnnnnnnnnnnnnnnnnnnnnnnnnnnnnnnnnnnnnnnnnnnnnnnnnnnnnnnnnnnnnnnnnnnnnnnnnnnnnnnnnnnnnnnnnnnnnnnnnnnnnnnnnnnnnnnnnnnnnnnnnnnnnnnnnnnnnnnnnnnnnnnnnnnnnnnnnnnnnnnnnnnnnnnnnnnnnnnnnnnnnnnnnnnnnnnnnnnnnnnnnnnnnnnnnnnnnnnnnnnnnnnnnnnnnnnnnnnnnnnnnnnnnnnnnnnnnnnnnnnnnnnnnnnnnnnnnnnnnnnnnnnnnnnnnnnnnnnnnnnnnnnnnnnnnnnnnnnnnnnnnnnnnnnnnnnnnnnnnnnnnnnnnnnnnnnnnnnnnnnnnnnnnnnnnnnnnnnnnnnnnnnnnnnnnnnnnnnnnnnnnnnnnnnnnnnnnnnnnnnnnnnnnnnnnnnnnnnnnnnnnnnnnnnnnnnnnnnnnnnnnnnnnnnnnnnnnnnnnnnnnnnnnnnnnnnnnnnnnnnnnnnnnnnnnnnnnnnnnnnnnnnnnnnnnnnnnnnnnnnnnnnnnnnnnnnnnnnnnnnnnnnnnnnnnnnnnnnnnnnnnnnnnnnnnnnnnnnnnnnnnnnnnnnnnnnnnnnnnnnnnnnnnnnnnnnnnnnnnnnnnnnnnnnnnnnnnnnnnnnnnnnnnnnnnnnnnnnnnnnnnnnnnnnnnnnnnnnnnnnnnnnnnnnnnnnnnnnnnnnnnnnnnnnnnnnnnnnnnnnnnnnnnnnnnnnnnnnnnnnnnnnnnnnnnnnnnnnnnnnnnnnnnnnnnnnnnnnnnnnnnnnnnnnnnnnnnnnnnnnnnnnnnnnnnnnnnnnnnnnnnnnnnnnnnnnnnnnnnnnnnnnnnnnnnnnnnnnnnnnnnnnnnnnnnnnnnnnnnnnnnnnnnnnnnnnnnnnnnnnnnnnnnnnnnnnnnnnnnnnnnnnnnnnnnnnnnnnnnnnnnnnnnnnnnnnnnnnnnnnnnnnnnnnnnnnnnnnnnnnnnnnnnnnnnnnnnnnnnnnnnnnnnnnnnnnnnnnnnnnnnnnnnnnnnnnnnnnnnnnnnnnnnnnnnnnnnnnnnnnnnnnnnnnnnnnnnnnnnnnnnnnnnnnnnnnnnnnnnnnnnnnnnnnnnnnnnnnnnnnnnnnnnnnnnnnnnnnnnnnnnnnnnnnnnnnnnnnnnnnnnnnnnnnnnnnnnnnnnnnnnnnnnnnnnnnnnnnnnnnnnnnnnnnnnnnnnnnnnnnnnnnnnnnnnnnnnnnnnnnnnnnnnnnnnnnnnnnnnnnnnnnnnnnnnnnnnnnnnnnnnnnnnnnnnnnnnnnnnnnnnnnnnnnnnnnnnnnnnnnnnnnnnnnnnnnnnnnnnnnnnnnnnnnnnnnnnnnnnnnnnnnnnnnnnnnnnnnnnnnnnnnnnnnnnnnnnnnnnnnnnnnnnnnnnnnnnnnnnnnnnnnnnnnnnnnnnnnnnnnnnnnnnnnnnnnnnnnnnnnnnnnnnnnnnnnnnnnnnnnnnnnnnnnnnnnnnnnnnnnnnnnnnnnnnnnnnnnnnnnnnnnnnnnnnnnnnnnnnnnnnnnnnnnnnnnnnnnnnnnnnnnnnnnnnnnnnnnnnnnnnnnnnnnnnnnnnnnnnnnnnnnnnnnnnnnnnnnnnnnnnnnnnnnnnnnnnnnnnnnnnnnnnnnnnnnnnnnnnnnnnnnnnnnnnnnnnnnnnnnnnnnnnnnnnnnnnnnnnnnnnnnnnnnnnnnnnnnnnnnnnnnnnnnnnnnnnnnnnnnnnnnnnnnnnnnnnnnnnnnnnnnnnnnnnnnnnnnnnnnnnnnnnnnnnnnnnnnnnnnnnnnnnnnnnnnnnnnnnnnnnnnnnnnnnnnnnnnnnnnnnnnnnnnnnnnnnnnnnnnnnnnnnnnnnnnnnnnnnnnnnnnnnnnnnnnnnnnnnnnnnnnnnnnnnnnnnnnnnnnnnnnnnnnnnnnnnnnnnnnnnnnnnnnnnnnnnnnnnnnnnnnnnnnnnnnnnnnnnnnnnnnnnnnnnnnnnnnnnnnnnnnnnnnnnnnnnnnnnnnnnnnnnnnnnnnnnnnnnnnnnnnnnnnnnnnnnnnnnnnnnnnnnnnnnnnnnnnnnnnnnnnnnnnnnnnnnnnnnnnnnnnnnnnnnnnnnnnnnnnnnnnnnnnnnnnnnnnnnnnnnnnnnnnnnnnnnnnnnnnnnnnnnnnnnnnnnnnnnnnnnnnnnnnnnnnnnnnnnnnnnnnnnnnnnnnnnnnnnnnnnnnnnnnnnnnnnnnnnnnnnnnnnnnnnnnnnnnnnnnnnnnnnnnnnnnnnnnnnnnnnnnnnnnnnnnnnnnnnnnnnnnnnnnnnnnnnnnnnnnnnnnnnnnnnnnnnnnnnnnnnnnnnnnnnnnnnnnnnnnnnnnnnnnnnnnnnnnnnnnnnnnnnnnnnnnnnnnnnnnnnnnnnnnnnnnnnnnnnnnnnnnnnnnnnnnnnnnnnnnnnnnnnnnnnnnnnnnnnnnnnnnnnnnnnnnnnnnnnnnnnnnnnnnnnnnnnnnnnnnnnnnnnnnnnnnnnnnnnnnnnnnnnnnnnnnnnnnnnnnnnnnnnnnnnnnnnnnnnnnnnnnnnnnnnnnnnnnnnnnnnnnnnnnnnnnnnnnnnnnnnnnnnnnnnnnnnnnnnnnnnnnnnnnnnnnnnnnnnnnnnnnnnnnnnnnnnnnnnnnnnnnnnnnnnnnnnnnnnnnnnnnnnnnnnnnnnnnnnnnnnnnnnnnnnnnnnnnnnnnnnnnnnnnnnnnnnnnnnnnnnnnnnnnnnnnnnnnnnnnnnnnnnnnnnnnnnnnnnnnnnnnnnnnnnnnnnnnnnnnnnnnnnnnnnnnnnnnnnnnnnnnnnnnnnnnnnnnnnnnnnnnnnnnnnnnnnnnnnnnnnnnnnnnnnnnnnnnnnnnnnnnnnnnnnnnnnnnnnnnnnnnnnnnnnnnnnnnnnnnnnnnnnnnnnnnnnnnnnnnnnnnnnnnnnnnnnnnnnnnnnnnnnnnnnnnnnnnnnnnnnnnnnnnnnnnnnnnnnnnnnnnnnnnnnnnnnnnnnnnnnnnnnnnnnnnnnnnnnnnnnnnnnnnnnnnnnnnnnnnnnnnnnnnnnnnnnnnnnnnnnnnnnnnnnnnnnnnnnnnnnnnnnnnnnnnnnnnnnnnnnnnnnnnnnnnnnnnnnnnnnnnnnnnnnnnnnnnnnnnnnnnnnnnnnnnnnnnnnnnnnnnnnnnnnnnnnnnnnnnnnnnnnnnnnnnnnnnnnnnnnnnnnnnnnnnnnnnnnnnnnnnnnnnnnnnnnnnnnnnnnnnnnnnnnnnnnnnnnnnnnnnnnnnnnnnnnnnnnnnnnnnnnnnnnnnnnnnnnnnnnnnnnnnnnnnnnnnnnnnnnnnnnnnnnnnnnnnnnnnnnnnnnnnnnnnnnnnnnnnnnnnnnnnnnnnnnnnnnnnnnnnnnnnnnnnnnnnnnnnnnnnnnnnnnnnnnnnnnnnnnnnnnnnnnnnnnnnnnnnnnnnnnnnnnnnnnnnnnnnnnnnnnnnnnnnnnnnnnnnnnnnnnnnnnnnnnnnnnnnnnnnnnnnnnnnnnnnnnnnnnnnnnnnnnnnnnnnnnnnnnnnnnnnnnnnnnnnnnnnnnnnnnnnnnnnnnnnnnnnnnnnnnnnnnnnnnnnnnnnnnnnnnnnnnnnnnnnnnnnnnnnnnnnnnnnnnnnnnnnnnnnnnnnnnnnnnnnnnnnnnnnnnnnnnnnnnnnnnnnnnnnnnnnnnnnnnnnnnnnnnnnnnnnnnnnnnnnnnnnnnnnnnnnnnnnnnnnnnnnnnnnnnnnnnnnnnnnnnnnnnnnnnnnnnnnnnnnnnnnnnnnnnnnnnnnnnnnnnnnnnnnnnnnnnnnnnnnnnnnnnnnnnnnnnnnnnnnnnnnnnnnnnnnnnnnnnnnnnnnnnnnnnnnnnnnnnnnnnnnnnnnnnnnnnnnnnnnnnnnnnnnnnnnnnnnnnnnnnnnnnnnnnnnnnnnnnnnnnnnnnnnnnnnnnnnnnnnnnnnnnnnnnnnnnnnnnnnnnnnnnnnnnnnnnnnnnnnnnnnnnnnnnnnnnnnnnnnnnnnnnnnnnnnnnnnnnnnnnnnnnnnnnnnnnnnnnnnnnnnnnnnnnnnnnnnnnnnnnnnnnnnnnnnnnnnnnnnnnnnnnnnnnnnnnnnnnnnnnnnnnnnnnnnnnnnnnnnnnnnnnnnnnnnnnnnnnnnnnnnnnnnnnnnnnnnnnnnnnnnnnnnnnnnnnnnnnnnnnnnnnnnnnnnnnnnnnnnnnnnnnnnnnnnnnnnnnnnnnnnnnnnnnnnnnnnnnnnnnnnnnnnnnnnnnnnnnnnnnnnnnnnnnnnnnnnnnnnnnnnnnnnnnnnnnnnnnnnnnnnnnnnnnnnnnnnnnnnnnnnnnnnnnnnnnnnnnnnnnnnnnnnnnnnnnnnnnnnnnnnnnnnnnnnnnnnnnnnnnnnnnnnnnnnnnnnnnnnnnnnnnnnnnnnnnnnnnnnnnnnnnnnnnnnnnnnnnnnnnnnnnnnnnnnnnnnnnnnnnnnnnnnnnnnnnnnnnnnnnnnnnnnnnnnnnnnnnnnnnnnnnnnnnnnnnnnnnnnnnnnnnnnnnnnnnnnnnnnnnnnnnnnnnnnnnnnnnnnnnnnnnnnnnnnnnnnnnnnnnnnnnnnnnnnnnnnnnnnnnnnnnnnnnnnnnnnnnnnnnnnnnnnnnnnnnnnnnnnnnnnnnnnnnnnnnnnnnnnnnnnnnnnnnnnnnnnnnnnnnnnnnnnnnnnnnnnnnnnnnnnnnnnnnnnnnnnnnnnnnnnnnnnnnnnnnnnnnnnnnnnnnnnnnnnnnnnnnnnnnnnnnnnnnnnnnnnnnnnnnnnnnnnnnnnnnnnnnnnnnnnnnnnnnnnnnnnnnnnnnnnnnnnnnnnnnnnnnnnnnnnnnnnnnnnnnnnnnnnnnnnnnnnnnnnnnnnnnnnnnnnnnnnnnnnnnnnnnnnnnnnnnnnnnnnnnnnnnnnnnnnnnnnnnnnnnnnnnnnnnnnnnnnnnnnnnnnnnnnnnnnnnnnnnnnnnnnnnnnnnnnnnnnnnnnnnnnnnnnnnnnnnnnnnnnnnnnnnnnnnnnnnnnnnnnnnnnnnnnnnnnnnnnnnnnnnnnnnnnnnnnnnnnnnnnnnnnnnnnnnnnnnnnnnnnnnnnnnnnnnnnnnnnnnnnnnnnnnnnnnnnnnnnnnnnnnnnnnnnnnnnnnnnnnnnnnnnnnnnnnnnnnnnnnnnnnnnnnnnnnnnnnnnnnnnnnnnnnnnnnnnnnnnnnnnnnnnnnnnnnnnnnnnnnnnnnnnnnnnnnnnnnnnnnnnnnnnnnnnnnnnnnnnnnnnnnnnnnnnnnnnnnnnnnnnnnnnnnnnnnnnnnnnnnnnnnnnnnnnnnnnnnnnnnnnnnnnnnnnnnnnnnnnnnnnnnnnnnnnnnnnnnnnnnnnnnnnnnnnnnnnnnnnnnnnnnnnnnnnnnnnnnnnnnnnnnnnnnnnnnnnnnnnnnnnnnnnnnnnnnnnnnnnnnnnnnnnnnnnnnnnnnnnnnnnnnnnnnnnnnnnnnnnnnnnnnnnnnnnnnnnnnnnnnnnnnnnnnnnnnnnnnnnnnnnnnnnnnnnnnnnnnnnnnnnnnnnnnnnnnnnnnnnnnnnnnnnnnnnnnnnnnnnnnnnnnnnnnnnnnnnnnnnnnnnnnnnnnnnnnnnnnnnnnnnnnnnnnnnnnnnnnnnnnnnnnnnnnnnnnnnnnnnnnnnnnnnnnnnnnnnnnnnnnnnnnnnnnnnnnnnnnnnnnnnnnnnnnnnnnnnnnnnnnnnnnnnnnnnnnnnnnnnnnnnnnnnnnnnnnnnnnnnnnnnnnnnnnnnnnnnnnnnnnnnnnnnnnnnnnnnnnnnnnnnnnnnnnnnnnnnnnnnnnnnnnnnnnnnnnnnnnnnnnnnnnnnnnnnnnnnnnnnnnnnnnnnnnnnnnnnnnnnnnnnnnnnnnnnnnnnnnnnnnnnnnnnnnnnnnnnnnnnnnnnnnnnnnnnnnnnnnnnnnnnnnnnnnnnnnnnnnnnnnnnnnnnnnnnnnnnnnnnnnnnnnnnnnnnnnnnnnnnnnnnnnnnnnnnnnnnnnnnnnnnnnnnnnnnnnnnnnnnnnnnnnnnnnnnnnnnnnnnnnnnnnnnnnnnnnnnnnnnnnnnnnnnnnnnnnnnnnnnnnnnnnnnnnnnnnnnnnnnnnnnnnnnnnnnnnnnnnnnnnnnnnnnnnnnnnnnnnnnnnnnnnnnnnnnnnnnnnnnnnnnnnnnnnnnnnnnnnnnnnnnnnnnnnnnnnnnnnnnnnnnnnnnnnnnnnnnnnnnnnnnnnnnnnnnnnnnnnnnnnnnnnnnnnnnnnnnnnnnnnnnnnnnnnnnnnnnnnnnnnnnnnnnnnnnnnnnnnnnnnnnnnnnnnnnnnnnnnnnnnnnnnnnnnnnnnnnnnnnnnnnnnnnnnnnnnnnnnnnnnnnnnnnnnnnnnnnnnnnnnnnnnnnnnnnnnnnnnnnnnnnnnnnnnnnnnnnnnnnnnnnnnnnnnnnnnnnnnnnnnnnnnnnnnnnnnnnnnnnnnnnnnnnnnnnnnnnnnnnnnnnnnnnnnnnnnnnnnnnnnnnnnnnnnnnnnnnnnnnnnnnnnnnnnnnnnnnnnnnnnnnnnnnnnnnnnnnnnnnnnnnnnnnnnnnnnnnnnnnnnnnnnnnnnnnnnnnnnnnnnnnnnnnnnnnnnnnnnnnnnnnnnnnnnnnnnnnnnnnnnnnnnnnnnnnnnnnnnnnnnnnnnnnnnnnnnnnnnnnnnnnnnnnnnnnnnnnnnnnnnnnnnnnnnnnnnnnnnnnnnnnnnnnnnnnnnnnnnnnnnnnnnnnnnnnnnnnnnnnnnnnnnnnnnnnnnnnnnnnnnnnnnnnnnnnnnnnnnnnnnnnnnnnnnnnnnnnnnnnnnnnnnnnnnnnnnnnnnnnnnnnnnnnnnnnnnnnnnnnnnnnnnnnnnnnnnnnnnnnnnnnnnnnnnnnnnnnnnnnnnnnnnnnnnnnnnnnnnnnnnnnnnnnnnnnnnnnnnnnnnnnnnnnnnnnnnnnnnnnnnnnnnnnnnnnnnnnnnnnnnnnnnnnnnnnnnnnnnnnnnnnnnnnnnnnnnnnnnnnnnnnnnnnnnnnnnnnnnnnnnnnnnnnnnnnnnnnnnnnnnnnnnnnnnnnnnnnnnnnnnnnnnnnnnnnnnnnnnnnnnnnnnnnnnnnnnnnnnnnnnnnnnnnnnnnnnnnnnnnnnnnnnnnnnnnnnnnnnnnnnnnnnnnnnnnnnnnnnnnnnnnnnnnnnnnnnnnnnnnnnnnnnnnnnnnnnnnnnnnnnnnnnnnnnnnnnnnnnnnnnnnnnnnnnnnnnnnnnnnnnnnnnnnnnnnnnnnnnnnnnnnnnnnnnnnnnnnnnnnnnnnnnnnnnnnnnnnnnnnnnnnnnnnnnnnnnnnnnnnnnnnnnnnnnnnnnnnnnnnnnnnnnnnnnnnnnnnnnnnnnnnnnnnnnnnnnnnnnnnnnnnnnnnnnnnnnnnnnnnnnnnnnnnnnnnnnnnnnnnnnnnnnnnnnnnnnnnnnnnnnnnnnnnnnnnnnnnnnnnnnnnnnnnnnnnnnnnnnnnnnnnnnnnnnnnnnnnnnnnnnnnnnnnnnnnnnnnnnnnnnnnnnnnnnnnnnnnnnnnnnnnnnnnnnnnnnnnnnnnnnnnnnnnnnnnnnnnnnnnnnnnnnnnnnnnnnnnnnnnnnnnnnnnnnnnnnnnnnnnnnnnnnnnnnnnnnnnnnnnnnnnnnnnnnnnnnnnnnnnnnnnnnnnnnnnnnnnnnnnnnnnnnnnnnnnnnnnnnnnnnnnnnnnnnnnnnnnnnnnnnnnnnnnnnnnnnnnnnnnnnnnnnnnnnnnnnnnnnnnnnnnnnnnnnnnnnnnnnnnnnnnnnnnnnnnnnnnnnnnnnnnnnnnnnnnnnnnnnnnnnnnnnnnnnnnnnnnnnnnnnnnnnnnnnnnnnnnnnnnnnnnnnnnnnnnnnnnnnnnnnnnnnnnnnnnnnnnnnnnnnnnnnnnnnnnnnnnnnnnnnnnnnnnnnnnnnnnnnnnnnnnnnnnnnnnnnnnnnnnnnnnnnnnnnnnnnnnnnnnnnnnnnnnnnnnnnnnnnnnnnnnnnnnnnnnnnnnnnnnnnnnnnnnnnnnnnnnnnnnnnnnnnnnnnnnnnnnnnnnnnnnnnnnnnnnnnnnnnnnnnnnnnnnnnnnnnnnnnnnnnnnnnnnnnnnnnnnnnnnnnnnnnnnnnnnnnnnnnnnnnnnnnnnnnnnnnnnnnnnnnnnnnnnnnnnnnnnnnnnnnnnnnnnnnnnnnnnnnnnnnnnnnnnnnnnnnnnnnnnnnnnnnnnnnnnnnnnnnnnnnnnnnnnnnnnnnnnnnnnnnnnnnnnnnnnnnnnnnnnnnnnnnnnnnnnnnnnnnnnnnnnnnnnnnnnnnnnnnnnnnnnnnnnnnnnnnnnnnnnnnnnnnnnnnnnnnnnnnnnnnnnnnnnnnnnnnnnnnnnnnnnnnnnnnnnnnnnnnnnnnnnnnnnnnnnnnnnnnnnnnnnnnnnnnnnnnnnnnnnnnnnnnnnnnnnnnnnnnnnnnnnnnnnnnnnnnnnnnnnnnnnnnnnnnnnnnnnnnnnnnnnnnnnnnnnnnnnnnnnnnnnnnnnnnnnnnnnnnnnnnnnnnnnnnnnnnnnnnnnnnnnnnnnnnnnnnnnnnnnnnnnnnnnnnnnnnnnnnnnnnnnnnnnnnnnnnnnnnnnnnnnnnnnnnnnnnnnnnnnnnnnnnnnnnnnnnnnnnnnnnnnnnnnnnnnnnnnnnnnnnnnnnnnnnnnnnnnnnnnnnnnnnnnnnnnnnnnnnnnnnnnnnnnnnnnnnnnnnnnnnnnnnnnnnnnnnnnnnnnnnnnnnnnnnnnnnnnnnnnnnnnnnnnnnnnnnnnnnnnnnnnnnnnnnnnnnnnnnnnnnnnnnnnnnnnnnnnnnnnnnnnnnnnnnnnnnnnnnnnnnnnnnnnnnnnnnnnnnnnnnnnnnnnnnnnnnnnnnnnnnnnnnnnnnnnnnnnnnnnnnnnnnnnnnnnnnnnnnnnnnnnnnnnnnnnnnnnnnnnnnnnnnnnnnnnnnnnnnnnnnnnnnnnnnnnnnnnnnnnnnnnnnnnnnnnnnnnnnnnnnnnnnnnnnnnnnnnnnnnnnnnnnnnnnnnnnnnnnnnnnnnnnnnnnnnnnnnnnnnnnnnnnnnnnnnnnnnnnnnnnnnnnnnnnnnnnnnnnnnnnnnnnnnnnnnnnnnnnnnnnnnnnnnnnnnnnnnnnnnnnnnnnnnnnnnnnnnnnnnnnnnnnnnnnnnnnnnnnnnnnnnnnnnnnnnnnnnnnnnnnnnnnnnnnnnnnnnnnnnnnnnnnnnnnnnnnnnnnnnnnnnnnnnnnnnnnnnnnnnnnnnnnnnnnnnnnnnnnnnnnnnnnnnnnnnnnnnnnnnnnnnnnnnnnnnnnnnnnnnnnnnnnnnnnnnnnnnnnnnnnnnnnnnnnnnnnnnnnnnnnnnnnnnnnnnnnnnnnnnnnnnnnnnnnnnnnnnnnnnnnnnnnnnnnnnnnnnnnnnnnnnnnnnnnnnnnnnnnnnnnnnnnnnnnnnnnnnnnnnnnnnnnnnnnnnnnnnnnnnnnnnnnnnnnnnnnnnnnnnnnnnnnnnnnnnnnnnnnnnnnnnnnnnnnnnnnnnnnnnnnnnnnnnnnnnnnnnnnnnnnnnnnnnnnnnnnnnnnnnnnnnnnnnnnnnnnnnnnnnnnnnnnnnnnnnnnnnnnnnnnnnnnnnnnnnnnnnnnnnnnnnnnnnnnnnnnnnnnnnnnnnnnnnnnnnnnnnnnnnnnnnnnnnnnnnnnnnnnnnnnnnnnnnnnnnnnnnnnnnnnnnnnnnnnnnnnnnnnnnnnnnnnnnnnnnnnnnnnnnnnnnnnnnnnnnnnnnnnnnnnnnnnnnnnnnnnnnnnnnnnnnnnnnnnnnnnnnnnnnnnnnnnnnnnnnnnnnnnnnnnnnnnnnnnnnnnnnnnnnnnnnnnnnnnnnnnnnnnnnnnnnnnnnnnnnnnnnnnnnnnnnnnnnnnnnnnnnnnnnnnnnnnnnnnnnnnnnnnnnnnnnnnnnnnnnnnnnnnnnnnnnnnnnnnnnnnnnnnnnnnnnnnnnnnnnnnnnnnnnnnnnnnnnnnnnnnnnnnnnnnnnnnnnnnnnnnnnnnnnnnnnnnnnnnnnnnnnnnnnnnnnnnnnnnnnnnnnnnnnnnnnnnnnnnnnnnnnnnnnnnnnnnnnnnnnnnnnnnnnnnnnnnnnnnnnnnnnnnnnnnnnnnnnnnnnnnnnnnnnnnnnnnnnnnnnnnnnnnnnnnnnnnnnnnnnnnnnnnnnnnnnnnnnnnnnnnnnnnnnnnnnnnnnnnnnnnnnnnnnnnnnnnnnnnnnnnnnnnnnnnnnnnnnnnnnnnnnnnnnnnnnnnnnnnnnnnnnnnnnnnnnnnnnnnnnnnnnnnnnnnnnnnnnnnnnnnnnnnnnnnnnnnnnnnnnnnnnnnnnnnnnnnnnnnnnnnnnnnnnnnnnnnnnnnnnnnnnnnnnnnnnnnnnnnnnnnnnnnnnnnnnnnnnnnnnnnnnnnnnnnnnnnnnnnnnnnnnnnnnnnnnnnnnnnnnnnnnnnnnnnnnnnnnnnnnnnnnnnnnnnnnnnnnnnnnnnnnnnnnnnnnnnnnnnnnnnnnnnnnnnnnnnnnnnnnnnnnnnnnnnnnnnnnnnnnnnnnnnnnnnnnnnnnnnnnnnnnnnnnnnnnnnnnnnnnnnnnnnnnnnnnnnnnnnnnnnnnnnnnnnnnnnnnnnnnnnnnnnnnnnnnnnnnnnnnnnnnnnnnnnnnnnnnnnnnnnnnnnnnnnnnnnnnnnnnnnnnnnnnnnnnnnnnnnnnnnnnnnnnnnnnnnnnnnnnnnnnnnnnnnnnnnnnnnnnnnnnnnnnnnnnnnnnnnnnnnnnnnnnnnnnnnnnnnnnnnnnnnnnnnnnnnnnnnnnnnnnnnnnnnnnnnnnnnnnnnnnnnnnnnnnnnnnnnnnnnnnnnnnnnnnnnnnnnnnnnnnnnnnnnnnnnnnnnnnnnnnnnnnnnnnnnnnnnnnnnnnnnnnnnnnnnnnnnnnnnnnnnnnnnnnnnnnnnnnnnnnnnnnnnnnnnnnnnnnnnnnnnnnnnnnnnnnnnnnnnnnnnnnnnnnnnnnnnnnnnnnnnnnnnnnnnnnnnnnnnnnnnnnnnnnnnnnnnnnnnnnnnnnnnnnnnnnnnnnnnnnnnnnnnnnnnnnnnnnnnnnnnnnnnnnnnnnnnnnnnnnnnnnnnnnnnnnnnnnnnnnnnnnnnnnnnnnnnnnnnnnnnnnnnnnnnnnnnnnnnnnnnnnnnnnnnnnnnnnnnnnnnnnnnnnnnnnnnnnnnnnnnnnnnnnnnnnnnnnnnnnnnnnnnnnnnnnnnnnnnnnnnnnnnnnnnnnnnnnnnnnnnnnnnnnnnnnnnnnnnnnnnnnnnnnnnnnnnnnnnnnnnnnnnnnnnnnnnnnnnnnnnnnnnnnnnnnnnnnnnnnnnnnnnnnnnnnnnnnnnnnnnnnnnnnnnnnnnnnnnnnnnnnnnnnnnnnnnnnnnnnnnnnnnnnnnnnnnnnnnnnnnnnnnnnnnnnnnnnnnnnnnnnnnnnnnnnnnnnnnnnnnnnnnnnnnnnnnnnnnnnnnnnnnnnnnnnnnnnnnnnnnnnnnnnnnnnnnnnnnnnnnnnnnnnnnnnnnnnnnnnnnnnnnnnnnnnnnnnnnnnnnnnnnnnnnnnnnnnnnnnnnnnnnnnnnnnnnnnnnnnnnnnnnnnnnnnnnnnnnnnnnnnnnnnnnnnnnnnnnnnnnnnnnnnnnnnnnnnnnnnnnnnnnnnnnnnnnnnnnnnnnnnnnnnnnnnnnnnnnnnnnnnnnnnnnnnnnnnnnnnnnnnnnnnnnnnnnnnnnnnnnnnnnnnnnnnnnnnnnnnnnnnnnnnnnnnnnnnnnnnnnnnnnnnnnnnnnnnnnnnnnnnnnnnnnnnnnnnnnnnnnnnnnnnnnnnnnnnnnnnnnnnnnnnnnnnnnnnnnnnnnnnnnnnnnnnnnnnnnnnnnnnnnnnnnnnnnnnnnnnnnnnnnnnnnnnnnnnnnnnnnnnnnnnnnnnnnnnnnnnnnnnnnnnnnnnnnnnnnnnnnnnnnnnnnnnnnnnnnnnnnnnnnnnnnnnnnnnnnnnnnnnnnnnnnnnnnnnnnnnnnnnnnnnnnnnnnnnnnnnnnnnnnnnnnnnnnnnnnnnnnnnnnnnnnnnnnnnnnnnnnnnnnnnnnnnnnnnnnnnnnnnnnnnnnnnnnnnnnnnnnnnnnnnnnnnnnnnnnnnnnnnnnnnnnnnnnnnnnnnnnnnnnnnnnnnnnnnnnnnnnnnnnnnnnnnnnnnnnnnnnnnnnnnnnnnnnnnnnnnnnnnnnnnnnnnnnnnnnnnnnnnnnnnnnnnnnnnnnnnnnnnnnnnnnnnnnnnnnnnnnnnnnnnnnnnnnnnnnnnnnnnnnnnnnnnnnnnnnnnnnnnnnnnnnnnnnnnnnnnnnnnnnnnnnnnnnnnnnnnnnnnnnnnnnnnnnnnnnnnnnnnnnnnnnnnnnnnnnnnnnnnnnnnnnnnnnnnnnnnnnnnnnnnnnnnnnnnnnnnnnnnnnnnnnnnnnnnnnnnnnnnnnnnnnnnnnnnnnnnnnnnnnnnnnnnnnnnnnnnnnnnnnnnnnnnnnnnnnnnnnnnnnnnnnnnnnnnnnnnnnnnnnnnnnnnnnnnnnnnnnnnnnnnnnnnnnnnnnnnnnnnnnnnnnnnnnnnnnnnnnnnnnnnnnnnnnnnnnnnnnnnnnnnnnnnnnnnnnnnnnnnnnnnnnnnnnnnnnnnnnnnnnnnnnnnnnnnnnnnnnnnnnnnnnnnnnnnnnnnnnnnnnnnnnnnnnnnnnnnnnnnnnnnnnnnnnnnnnnnnnnnnnnnnnnnnnnnnnnnnnnnnnnnnnnnnnnnnnnnnnnnnnnnnnnnnnnnnnnnnnnnnnnnnnnnnnnnnnnnnnnnnnnnnnnnnnnnnnnnnnnnnnnnnnnnnnnnnnnnnnnnnnnnnnnnnnnnnnnnnnnnnnnnnnnnnnnnnnnnnnnnnnnnnnnnnnnnnnnnnnnnnnnnnnnnnnnnnnnnnnnnnnnnnnnnnnnnnnnnnnnnnnnnnnnnnnnnnnnnnnnnnnnnnnnnnnnnnnnnnnnnnnnnnnnnnnnnnnnnnnnnnnnnnnnnnnnnnnnnnnnnnnnnnnnnnnnnnnnnnnnnnnnnnnnnnnnnnnnnnnnnnnnnnnnnnnnnnnnnnnnnnnnnnnnnnnnnnnnnnnnnnnnnnnnnnnnnnnnnnnnnnnnnnnnnnnnnnnnnnnnnnnnnnnnnnnnnnnnnnnnnnnnnnnnnnnnnnnnnnnnnnnnnnnnnnnnnnnnnnnnnnnnnnnnnnnnnnnnnnnnnnnnnnnnnnnnnnnnnnnnnnnnnnnnnnnnnnnnnnnnnnnnnnnnnnnnnnnnnnnnnnnnnnnnnnnnnnnnnnnnnnnnnnnnnnnnnnnnnnnnnnnnnnnnnnnnnnnnnnnnnnnnnnnnnnnnnnnnnnnnnnnnnnnnnnnnnnnnnnnnnnnnnnnnnnnnnnnnnnnnnnnnnnnnnnnnnnnnnnnnnnnnnnnnnnnnnnnnnnnnnnnnnnnnnnnnnnnnnnnnnnnnnnnnnnnnnnnnnnnnnnnnnnnnnnnnnnnnnnnnnnnnnnnnnnnnnnnnnnnnnnnnnnnnnnnnnnnnnnnnnnnnnnnnnnnnnnnnnnnnnnnnnnnnnnnnnnnnnnnnnnnnnnnnnnnnnnnnnnnnnnnnnnnnnnnnnnnnnnnnnnnnnnnnnnnnnnnnnnnnnnnnnnnnnnnnnnnnnnnnnnnnnnnnnnnnnnnnnnnnnnnnnnnnnnnnnnnnnnnnnnnnnnnnnnnnnnnnnnnnnnnnnnnnnnnnnnnnnnnnnnnnnnnnnnnnnnnnnnnnnnnnnnnnnnnnnnnnnnnnnnnnnnnnnnnnnnnnnnnnnnnnnnnnnnnnnnnnnnnnnnnnnnnnnnnnnnnnnnnnnnnnnnnnnnnnnnnnnnnnnnnnnnnnnnnnnnnnnnnnnnnnnnnnnnnnnnnnnnnnnnnnnnnnnnnnnnnnnnnnnnnnnnnnnnnnnnnnnnnnnnnnnnnnnnnnnnnnnnnnnnnnnnnnnnnnnnnnnnnnnnnnnnnnnnnnnnnnnnnnnnnnnnnnnnnnnnnnnnnnnnnnnnnnnnnnnnnnnnnnnnnnnnnnnnnnnnnnnnnnnnnnnnnnnnnnnnnnnnnnnnnnnnnnnnnnnnnnnnnnnnnnnnnnnnnnnnnnnnnnnnnnnnnnnnnnnnnnnnnnnnnnnnnnnnnnnnnnnnnnnnnnnnnnnnnnnnnnnnnnnnnnnnnnnnnnnnnnnnnnnnnnnnnnnnnnnnnnnnnnnnnnnnnnnnnnnnnnnnnnnnnnnnnnnnnnnnnnnnnnnnnnnnnnnnnnnnnnnnnnnnnnnnnnnnnnnnnnnnnnnnnnnnnnnnnnnnnnnnnnnnnnnnnnnnnnnnnnnnnnnnnnnnnnnnnnnnnnnnnnnnnnnnnnnnnnnnnnnnnnnnnnnnnnnnnnnnnnnnnnnnnnnnnnnnnnnnnnnnnnnnnnnnnnnnnnnnnnnnnnnnnnnnnnnnnnnnnnnnnnnnnnnnnnnnnnnnnnnnnnnnnnnnnnnnnnnnnnnnnnnnnnnnnnnnnnnnnnnnnnnnnnnnnnnnnnnnnnnnnnnnnnnnnnnnnnnnnnnnnnnnnnnnnnnnnnnnnnnnnnnnnnnnnnnnnnnnnnnnnnnnnnnnnnnnnnnnnnnnnnnnnnnnnnnnnnnnnnnnnnnnnnnnnnnnnnnnnnnnnnnnnnnnnnnnnnnnnnnnnnnnnnnnnnnnnnnnnnnnnnnnnnnnnnnnnnnnnnnnnnnnnnnnnnnnnnnnnnnnnnnnnnnnnnnnnnnnnnnnnnnnnnnnnnnnnnnnnnnnnnnnnnnnnnnnnnnnnnnnnnnnnnnnnnnnnnnnnnnnnnnnnnnnnnnnnnnnnnnnnnnnnnnnnnnnnnnnnnnnnnnnnnnnnnnnnnnnnnnnnnnnnnnnnnnnnnnnnnnnnnnnnnnnnnnnnnnnnnnnnnnnnnnnnnnnnnnnnnnnnnnnnnnnnnnnnnnnnnnnnnnnnnnnnnnnnnnnnnnnnnnnnnnnnnnnnnnnnnnnnnnnnnnnnnnnnnnnnnnnnnnnnnnnnnnnnnnnnnnnnnnnnnnnnnnnnnnnnnnnnnnnnnnnnnnnnnnnnnnnnnnnnnnnnnnnnnnnnnnnnnnnnnnnnnnnnnnnnnnnnnnnnnnnnnnnnnnnnnnnnnnnnnnnnnnnnnnnnnnnnnnnnnnnnnnnnnnnnnnnnnnnnnnnnnnnnnnnnnnnnnnnnnnnnnnnnnnnnnnnnnnnnnnnnnnnnnnnnnnnnnnnnnnnnnnnnnnnnnnnnnnnnnnnnnnnnnnnnnnnnnnnnnnnnnnnnnnnnnnnnnnnnnnnnnnnnnnnnnnnnnnnnnnnnnnnnnnnnnnnnnnnnnnnnnnnnnnnnnnnnnnnnnnnnnnnnnnnnnnnnnnnnnnnnnnnnnnnnnnnnnnnnnnnnnnnnnnnnnnnnnnnnnnnnnnnnnnnnnnnnnnnnnnnnnnnnnnnnnnnnnnnnnnnnnnnnnnnnnnnnnnnnnnnnnnnnnnnnnnnnnnnnnnnnnnnnnnnnnnnnnnnnnnnnnnnnnnnnnnnnnnnnnnnnnnnnnnnnnnnnnnnnnnnnnnnnnnnnnnnnnnnnnnnnnnnnnnnnnnnnnnnnnnnnnnnnnnnnnnnnnnnnnnnnnnnnnnnnnnnnnnnnnnnnnnnnnnnnnnnnnnnnnnnnnnnnnnnnnnnnnnnnnnnnnnnnnnnnnnnnnnnnnnnnnnnnnnnnnnnnnnnnnnnnnnnnnnnnnnnnnnnnnnnnnnnnnnnnnnnnnnnnnnnnnnnnnnnnnnnnnnnnnnnnnnnnnnnnnnnnnnnnnnnnnnnnnnnnnnnnnnnnnnnnnnnnnnnnnnnnnnnnnnnnnnnnnnnnnnnnnnnnnnnnnnnnnnnnnnnnnnnnnnnnnnnnnnnnnnnnnnnnnnnnnnnnnnnnnnnnnnnnnnnnnnnnnnnnnnnnnnnnnnnnnnnnnnnnnnnnnnnnnnnnnnnnnnnnnnnnnnnnnnnnnnnnnnnnnnnnnnnnnnnnnnnnnnnnnnnnnnnnnnnnnnnnnnnnnnnnnnnnnnnnnnnnnnnnnnnnnnnnnnnnnnnnnnnnnnnnnnnnnnnnnnnnnnnnnnnnnnnnnnnnnnnnnnnnnnnnnnnnnnnnnnnnnnnnnnnnnnnnnnnnnnnnnnnnnnnnnnnnnnnnnnnnnnnnnnnnnnnnnnnnnnnnnnnnnnnnnnnnnnnnnnnnnnnnnnnnnnnnnnnnnnnnnnnnnnnnnnnnnnnnnnnnnnnnnnnnnnnnnnnnnnnnnnnnnnnnnnnnnnnnnnnnnnnnnnnnnnnnnnnnnnnnnnnnnnnnnnnnnnnnnnnnnnnnnnnnnnnnnnnnnnnnnnnnnnnnnnnnnnnnnnnnnnnnnnnnnnnnnnnnnnnnnnnnnnnnnnnnnnnnnnnnnnnnnnnnnnnnnnnnnnnnnnnnnnnnnnnnnnnnnnnnnnnnnnnnnnnnnnnnnnnnnnnnnnnnnnnnnnnnnnnnnnnnnnnnnnnnnnnnnnnnnnnnnnnnnnnnnnnnnnnnnnnnnnnnnnnnnnnnnnnnnnnnnnnnnnnnnnnnnnnnnnnnnnnnnnnnnnnnnnnnnnnnnnnnnnnnnnnnnnnnnnnnnnnnnnnnnnnnnnnnnnnnnnnnnnnnnnnnnnnnnnnnnnnnnnnnnnnnnnnnnnnnnnnnnnnnnnnnnnnnnnnnnnnnnnnnnnnnnnnnnnnnnnnnnnnnnnnnnnnnnnnnnnnnnnnnnnnnnnnnnnnnnnnnnnnnnnnnnnnnnnnnnnnnnnnnnnnnnnnnnnnnnnnnnnnnnnnnnnnnnnnnnnnnnnnnnnnnnnnnnnnnnnnnnnnnnnnnnnnnnnnnnnnnnnnnnnnnnnnnnnnnnnnnnnnnnnnnnnnnnnnnnnnnnnnnnnnnnnnnnnnnnnnnnnnnnnnnnnnnnnnnnnnnnnnnnnnnnnnnnnnnnnnnnnnnnnnnnnnnnnnnnnnnnnnnnnnnnnnnnnnnnnnnnnnnnnnnnnnnnnnnnnnnnnnnnnnnnnnnnnnnnnnnnnnnnnnnnnnnnnnnnnnnnnnnnnnnnnnnnnnnnnnnnnnnnnnnnnnnnnnnnnnnnnnnnnnnnnnnnnnnnnnnnnnnnnnnnnnnnnnnnnnnnnnnnnnnnnnnnnnnnnnnnnnnnnnnnnnnnnnnnnnnnnnnnnnnnnnnnnnnnnnnnnnnnnnnnnnnnnnnnnnnnnnnnnnnnnnnnnnnnnnnnnnnnnnnnnnnnnnnnnnnnnnnnnnnnnnnnnnnnnnnnnnnnnnnnnnnnnnnnnnnnnnnnnnnnnnnnnnnnnnnnnnnnnnnnnnnnnnnnnnnnnnnnnnnnnnnnnnnnnnnnnnnnnnnnnnnnnnnnnnnnnnnnnnnnnnnnnnnnnnnnnnnnnnnnnnnnnnnnnnnnnnnnnnnnnnnnnnnnnnnnnnnnnnnnnnnnnnnnnnnnnnnnnnnnnnnnnnnnnnnnnnnnnnnnnnnnnnnnnnnnnnnnnnnnnnnnnnnnnnnnnnnnnnnnnnnnnnnnnnnnnnnnnnnnnnnnnnnnnnnnnnnnnnnnnnnnnnnnnnnnnnnnnnnnnnnnnnnnnnnnnnnnnnnnnnnnnnnnnnnnnnnnnnnnnnnnnnnnnnnnnnnnnnnnnnnnnnnnnnnnnnnnnnnnnnnnnnnnnnnnnnnnnnnnnnnnnnnnnnnnnnnnnnnnnnnnnnnnnnnnnnnnnnnnnnnnnnnnnnnnnnnnnnnnnnnnnnnnnnnnnnnnnnnnnnnnnnnnnnnnnnnnnnnnnnnnnnnnnnnnnnnnnnnnnnnnnnnnnnnnnnnnnnnnnnnnnnnnnnnnnnnnnnnnnnnnnnnnnnnnnnnnnnnnnnnnnnnnnnnnnnnnnnnnnnnnnnnnnnnnnnnnnnnnnnnnnnnnnnnnnnnnnnnnnnnnnnnnnnnnnnnnnnnnnnnnnnnnnnnnnnnnnnnnnnnnnnnnnnnnnnnnnnnnnnnnnnnnnnnnnnnnnnnnnnnnnnnnnnnnnnnnnnnnnnnnnnnnnnnnnnnnnnnnnnnnnnnnnnnnnnnnnnnnnnnnnnnnnnnnnnnnnnnnnnnnnnnnnnnnnnnnnnnnnnnnnnnnnnnnnnnnnnnnnnnnnnnnnnnnnnnnnnnnnnnnnnnnnnnnnnnnnnnnnnnnnnnnnnnnnnnnnnnnnnnnnnnnnnnnnnnnnnnnnnnnnnnnnnnnnnnnnnnnnnnnnnnnnnnnnnnnnnnnnnnnnnnnnnnnnnnnnnnnnnnnnnnnnnnnnnnnnnnnnnnnnnnnnnnnnnnnnnnnnnnnnnnnnnnnnnnnnnnnnnnnnnnnnnnnnnnnnnnnnnnnnnnnnnnnnnnnnnnnnnnnnnnnnnnnnnnnnnnnnnnnnnnnnnnnnnnnnnnnnnnnnnnnnnnnnnnnnnnnnnnnnnnnnnnnnnnnnnnnnnnnnnnnnnnnnnnnnnnnnnnnnnnnnnnnnnnnnnnnnnnnnnnnnnnnnnnnnnnnnnnnnnnnnnnnnnnnnnnnnnnnnnnnnnnnnnnnnnnnnnnnnnnnnnnnnnnnnnnnnnnnnnnnnnnnnnnnnnnnnnnnnnnnnnnnnnnnnnnnnnnnnnnnnnnnnnnnnnnnnnnnnnnnnnnnnnnnnnnnnnnnnnnnnnnnnnnnnnnnnnnnnnnnnnnnnnnnnnnnnnnnnnnnnnnnnnnnnnnnnnnnnnnnnnnnnnnnnnnnnnnnnnnnnnnnnnnnnnnnnnnnnnnnnnnnnnnnnnnnnnnnnnnnnnnnnnnnnnnnnnnnnnnnnnnnnnnnnnnnnnnnnnnnnnnnnnnnnnnnnnnnnnnnnnnnnnnnnnnnnnnnnnnnnnnnnnnnnnnnnnnnnnnnnnnnnnnnnnnnnnnnnnnnnnnnnnnnnnnnnnnnnnnnnnnnnnnnnnnnnnnnnnnnnnnnnnnnnnnnnnnnnnnnnnnnnnnnnnnnnnnnnnnnnnnnnnnnnnnnnnnnnnnnnnnnnnnnnnnnnnnnnnnnnnnnnnnnnnnnnnnnnnnnnnnnnnnnnnnnnnnnnnnnnnnnnnnnnnnnnnnnnnnnnnnnnnnnnnnnnnnnnnnnnnnnnnnnnnnnnnnnnnnnnnnnnnnnnnnnnnnnnnnnnnnnnnnnnnnnnnnnnnnnnnnnnnnnnnnnnnnnnnnnnnnnnnnnnnnnnnnnnnnnnnnnnnnnnnnnnnnnnnnnnnnnnnnnnnnnnnnnnnnnnnnnnnnnnnnnnnnnnnnnnnnnnnnnnnnnnnnnnnnnnnnnnnnnnnnnnnnnnnnnnnnnnnnnnnnnnnnnnnnnnnnnnnnnnnnnnnnnnnnnnnnnnnnnnnnnnnnnnnnnnnnnnnnnnnnnnnnnnnnnnnnnnnnnnnnnnnnnnnnnnnnnnnnnnnnnnnnnnnnnnnnnnnnnnnnnnnnnnnnnnnnnnnnnnnnnnnnnnnnnnnnnnnnnnnnnnnnnnnnnnnnnnnnnnnnnnnnnnnnnnnnnnnnnnnnnnnnnnnnnnnnnnnnnnnnnnnnnnnnnnnnnnnnnnnnnnnnnnnnnnnnnnnnnnnnnnnnnnnnnnnnnnnnnnnnnnnnnnnnnnnnnnnnnnnnnnnnnnnnnnnnnnnnnnnnnnnnnnnnnnnnnnnnnnnnnnnnnnnnnnnnnnnnnnnnnnnnnnnnnnnnnnnnnnnnnnnnnnnnnnnnnnnnnnnnnnnnnnnnnnnnnnnnnnnnnnnnnnnnnnnnnnnnnnnnnnnnnnnnnnnnnnnnnnnnnnnnnnnnnnnnnnnnnnnnnnnnnnnnnnnnnnnnnnnnnnnnnnnnnnnnnnnnnnnnnnnnnnnnnnnnnnnnnnnnnnnnnnnnnnnnnnnnnnnnnnnnnnnnnnnnnnnnnnnnnnnnnnnnnnnnnnnnnnnnnnnnnnnnnnnnnnnnnnnnnnnnnnnnnnnnnnnnnnnnnnnnnnnnnnnnnnnnnnnnnnnnnnnnnnnnnnnnnnnnnnnnnnnnnnnnnnnnnnnnnnnnnnnnnnnnnnnnnnnnnnnnnnnnnnnnnnnnnnnnnnnnnnnnnnnnnnnnnnnnnnnnnnnnnnnnnnnnnnnnnnnnnnnnnnnnnnnnnnnnnnnnnnnnnnnnnnnnnnnnnnnnnnnnnnnnnnnnnnnnnnnnnnnnnnnnnnnnnnnnnnnnnnnnnnnnnnnnnnnnnnnnnnnnnnnnnnnnnnnnnnnnnnnnnnnnnnnnnnnnnnnnnnnnnnnnnnnnnnnnnnnnnnnnnnnnnnnnnnnnnnnnnnnnnnnnnnnnnnnnnnnnnnnnnnnnnnnnnnnnnnnnnnnnnnnnnnnnnnnnnnnnnnnnnnnnnnnnnnnnnnnnnnnnnnnnnnnnnnnnnnnnnnnnnnnnnnnnnnnnnnnnnnnnnnnnnnnnnnnnnnnnnnnnnnnnnnnnnnnnnnnnnnnnnnnnnnnnnnnnnnnnnnnnnnnnnnnnnnnnnnnnnnnnnnnnnnnnnnnnnnnnnnnnnnnnnnnnnnnnnnnnnnnnnnnnnnnnnnnnnnnnnnnnnnnnnnnnnnnnnnnnnnnnnnnnnnnnnnnnnnnnnnnnnnnnnnnnnnnnnnnnnnnnnnnnnnnnnnnnnnnnnnnnnnnnnnnnnnnnnnnnnnnnnnnnnnnnnnnnnnnnnnnnnnnnnnnnnnnnnnnnnnnnnnnnnnnnnnnnnnnnnnnnnnnnnnnnnnnnnnnnnnnnnnnnnnnnnnnnnnnnnnnnnnnnnnnnnnnnnnnnnnnnnnnnnnnnnnnnnnnnnnnnnnnnnnnnnnnnnnnnnnnnnnnnnnnnnnnnnnnnnnnnnnnnnnnnnnnnnnnnnnnnnnnnnnnnnnnnnnnnnnnnnnnnnnnnnnnnnnnnnnnnnnnnnnnnnnnnnnnnnnnnnnnnnnnnnnnnnnnnnnnnnnnnnnnnnnnnnnnnnnnnnnnnnnnnnnnnnnnnnnnnnnnnnnnnnnnnnnnnnnnnnnnnnnnnnnnnnnnnnnnnnnnnnnnnnnnnnnnnnnnnnnnnnnnnnnnnnnnnnnnnnnnnnnnnnnnnnnnnnnnnnnnnnnnnnnnnnnnnnnnnnnnnnnnnnnnnnnnnnnnnnnnnnnnnnnnnnnnnnnnnnnnnnnnnnnnnnnnnnnnnnnnnnnnnnnnnnnnnnnnnnnnnnnnnnnnnnnnnnnnnnnnnnnnnnnnnnnnnnnnnnnnnnnnnnnnnnnnnnnnnnnnnnnnnnnnnnnnnnnnnnnnnnnnnnnnnnnnnnnnnnnnnnnnnnnnnnnnnnnnnnnnnnnnnnnnnnnnnnnnnnnnnnnnnnnnnnnnnnnnnnnnnnnnnnnnnnnnnnnnnnnnnnnnnnnnnnnnnnnnnnnnnnnnnnnnnnnnnnnnnnnnnnnnnnnnnnnnnnnnnnnnnnnnnnnnnnnnnnnnnnnnnnnnnnnnnnnnnnnnnnnnnnnnnnnnnnnnnnnnnnnnnnnnnnnnnnnnnnnnnnnnnnnnnnnnnnnnnnnnnnnnnnnnnnnnnnnnnnnnnnnnnnnnnnnnnnnnnnnnnnnnnnnnnnnnnnnnnnnnnnnnnnnnnnnnnnnnnnnnnnnnnnnnnnnnnnnnnnnnnnnnnnnnnnnnnnnnnnnnnnnnnnnnnnnnnnnnnnnnnnnnnnnnnnnnnnnnnnnnnnnnnnnnnnnnnnnnnnnnnnnnnnnnnnnnnnnnnnnnnnnnnnnnnnnnnnnnnnnnnnnnnnnnnnnnnnnnnnnnnnnnnnnnnnnnnnnnnnnnnnnnnnnnnnnnnnnnnnnnnnnnnnnnnnnnnnnnnnnnnnnnnnnnnnnnnnnnnnnnnnnnnnnnnnnnnnnnnnnnnnnnnnnnnnnnnnnnnnnnnnnnnnnnnnnnnnnnnnnnnnnnnnnnnnnnnnnnnnnnnnnnnnnnnnnnnnnnnnnnnnnnnnnnnnnnnnnnnnnnnnnnnnnnnnnnnnnnnnnnnnnnnnnnnnnnnnnnnnnnnnnnnnnnnnnnnnnnnnnnnnnnnnnnnnnnnnnnnnnnnnnnnnnnnnnnnnnnnnnnnnnnnnnnnnnnnnnnnnnnnnnnnnnnnnnnnnnnnnnnnnnnnnnnnnnnnnnnnnnnnnnnnnnnnnnnnnnnnnnnnnnnnnnnnnnnnnnnnnnnnnnnnnnnnnnnnnnnnnnnnnnnnnnnnnnnnnnnnnnnnnnnnnnnnnnnnnnnnnnnnnnnnnnnnnnnnnnnnnnnnnnnnnnnnnnnnnnnnnnnnnnnnnnnnnnnnnnnnnnnnnnnnnnnnnnnnnnnnnnnnnnnnnnnnnnnnnnnnnnnnnnnnnnnnnnnnnnnnnnnnnnnnnnnnnnnnnnnnnnnnnnnnnnnnnnnnnnnnnnnnnnnnnnnnnnnnnnnnnnnnnnnnnnnnnnnnnnnnnnnnnnnnnnnnnnnnnnnnnnnnnnnnnnnnnnnnnnnnnnnnnnnnnnnnnnnnnnnnnnnnnnnnnnnnnnnnnnnnnnnnnnnnnnnnnnnnnnnnnnnnnnnnnnnnnnnnnnnnnnnnnnnnnnnnnnnnnnnnnnnnnnnnnnnnnnnnnnnnnnnnnnnnnnnnnnnnnnnnnnnnnnnnnnnnnnnnnnnnnnnnnnnnnnnnnnnnnnnnnnnnnnnnnnnnnnnnnnnnnnnnnnnnnnnnnnnnnnnnnnnnnnnnnnnnnnnnnnnnnnnnnnnnnnnnnnnnnnnnnnnnnnnnnnnnnnnnnnnnnnnnnnnnnnnnnnnnnnnnnnnnnnnnnnnnnnnnnnnnnnnnnnnnnnnnnnnnnnnnnnnnnnnnnnnnnnnnnnnnnnnnnnnnnnnnnnnnnnnnnnnnnnnnnnnnnnnnnnnnnnnnnnnnnnnnnnnnnnnnnnnnnnnnnnnnnnnnnnnnnnnnnnnnnnnnnnnnnnnnnnnnnnnnnnnnnnnnnnnnnnnnnnnnnnnnnnnnnnnnnnnnnnnnnnnnnnnnnnnnnnnnnnnnnnnnnnnnnnnnnnnnnnnnnnnnnnnnnnnnnnnnnnnnnnnnnnnnnnnnnnnnnnnnnnnnnnnnnnnnnnnnnnnnnnnnnnnnnnnnnnnnnnnnnnnnnnnnnnnnnnnnnnnnnnnnnnnnnnnnnnnnnnnnnnnnnnnnnnnnnnnnnnnnnnnnnnnnnnnnnnnnnnnnnnnnnnnnnnnnnnnnnnnnnnnnnnnnnnnnnnnnnnnnnnnnnnnnnnnnnnnnnnnnnnnnnnnnnnnnnnnnnnnnnnnnnnnnnnnnnnnnnnnnnnnnnnnnnnnnnnnnnnnnnnnnnnnnnnnnnnnnnnnnnnnnnnnnnnnnnnnnnnnnnnnnnnnnnnnnnnnnnnnnnnnnnnnnnnnnnnnnnnnnnnnnnnnnnnnnnnnnnnnnnnnnnnnnnnnnnnnnnnnnnnnnnnnnnnnnnnnnnnnnnnnnnnnnnnnnnnnnnnnnnnnnnnnnnnnnnnnnnnnnnnnnnnnnnnnnnnnnnnnnnnnnnnnnnnnnnnnnnnnnnnnnnnnnnnnnnnnnnnnnnnnnnnnnnnnnnnnnnnnnnnnnnnnnnnnnnnnnnnnnnnnnnnnnnnnnnnnnnnnnnnnnnnnnnnnnnnnnnnnnnnnnnnnnnnnnnnnnnnnnnnnnnnnnnnnnnnnnnnnnnnnnnnnnnnnnnnnnnnnnnnnnnnnnnnnnnnnnnnnnnnnnnnnnnnnnnnnnnnnnnnnnnnnnnnnnnnnnnnnnnnnnnnnnnnnnnnnnnnnnnnnnnnnnnnnnnnnnnnnnnnnnnnnnnnnnnnnnnnnnnnnnnnnnnnnnnnnnnnnnnnnnnnnnnnnnnnnnnnnnnnnnnnnnnnnnnnnnnnnnnnnnnnnnnnnnnnnnnnnnnnnnnnnnnnnnnnnnnnnnnnnnnnnnnnnnnnnnnnnnnnnnnnnnnnnnnnnnnnnnnnnnnnnnnnnnnnnnnnnnnnnnnnnnnnnnnnnnnnnnnnnnnnnnnnnnnnnnnnnnnnnnnnnnnnnnnnnnnnnnnnnnnnnnnnnnnnnnnnnnnnnnnnnnnnnnnnnnnnnnnnnnnnnnnnnnnnnnnnnnnnnnnnnnnnnnnnnnnnnnnnnnnnnnnnnnnnnnnnnnnnnnnnnnnnnnnnnnnnnnnnnnnnnnnnnnnnnnnnnnnnnnnnnnnnnnnnnnnnnnnnnnnnnnnnnnnnnnnnnnnnnnnnnnnnnnnnnnnnnnnnnnnnnnnnnnnnnnnnnnnnnnnnnnnnnnnnnnnnnnnnnnnnnnnnnnnnnnnnnnnnnnnnnnnnnnnnnnnnnnnnnnnnnnnnnnnnnnnnnnnnnnnnnnnnnnnnnnnnnnnnnnnnnnnnnnnnnnnnnnnnnnnnnnnnnnnnnnnnnnnnnnnnnnnnnnnnnnnnnnnnnnnnnnnnnnnnnnnnnnnnnnnnnnnnnnnnnnnnnnnnnnnnnnnnnnnnnnnnnnnnnnnnnnnnnnnnnnnnnnnnnnnnnnnnnnnnnnnnnnnnnnnnnnnnnnnnnnnnnnnnnnnnnnnnnnnnnnnnnnnnnnnnnnnnnnnnnnnnnnnnnnnnnnnnnnnnnnnnnnnnnnnnnnnnnnnnnnnnnnnnnnnnnnnnnnnnnnnnnnnnnnnnnnnnnnnnnnnnnnnnnnnnnnnnnnnnnnnnnnnnnnnnnnnnnnnnnnnnnnnnnnnnnnnnnnnnnnnnnnnnnnnnnnnnnnnnnnnnnnnnnnnnnnnnnnnnnnnnnnnnnnnnnnnnnnnnnnnnnnnnnnnnnnnnnnnnnnnnnnnnnnnnnnnnnnnnnnnnnnnnnnnnnnnnnnnnnnnnnnnnnnnnnnnnnnnnnnnnnnnnnnnnnnnnnnnnnnnnnnnnnnnnnnnnnnnnnnnnnnnnnnnnnnnnnnnnnnnnnnnnnnnnnnnnnnnnnnnnnnnnnnnnnnnnnnnnnnnnnnnnnnnnnnnnnnnnnnnnnnnnnnnnnnnnnnnnnnnnnnnnnnnnnnnnnnnnnnnnnnnnnnnnnnnnnnnnnnnnnnnnnnnnnnnnnnnnnnnnnnnnnnnnnnnnnnnnnnnnnnnnnnnnnnnnnnnnnnnnnnnnnnnnnnnnnnnnnnnnnnnnnnnnnnnnnnnnnnnnnnnnnnnnnnnnnnnnnnnnnnnnnnnnnnnnnnnnnnnnnnnnnnnnnnnnnnnnnnnnnnnnnnnnnnnnnnnnnnnnnnnnnnnnnnnnnnnnnnnnnnnnnnnnnnnnnnnnnnnnnnnnnnnnnnnnnnnnnnnnnnnnnnnnnnnnnnnnnnnnnnnnnnnnnnnnnnnnnnnnnnnnnnnnnnnnnnnnnnnnnnnnnnnnnnnnnnnnnnnnnnnnnnnnnnnnnnnnnnnnnnnnnnnnnnnnnnnnnnnnnnnnnnnnnnnnnnnnnnnnnnnnnnnnnnnnnnnnnnnnnnnnnnnnnnnnnnnnnnnnnnnnnnnnnnnnnnnnnnnnnnnnnnnnnnnnnnnnnnnnnnnnnnnnnnnnnnnnnnnnnnnnnnnnnnnnnnnnnnnnnnnnnnnnnnnnnnnnnnnnnnnnnnnnnnnnnnnnnnnnnnnnnnnnnnnnnnnnnnnnnnnnnnnnnnnnnnnnnnnnnnnnnnnnnnnnnnnnnnnnnnnnnnnnnnnnnnnnnnnnnnnnnnnnnnnnnnnnnnnnnnnnnnnnnnnnnnnnnnnnnnnnnnnnnnnnnnnnnnnnnnnnnnnnnnnnnnnnnnnnnnnnnnnnnnnnnnnnnnnnnnnnnnnnnnnnnnnnnnnnnnnnnnnnnnnnnnnnnnnnnnnnnnnnnnnnnnnnnnnnnnnnnnnnnnnnnnnnnnnnnnnnnnnnnnnnnnnnnnnnnnnnnnnnnnnnnnnnnnnnnnnnnnnnnnnnnnnnnnnnnnnnnnnnnnnnnnnnnnnnnnnnnnnnnnnnnnnnnnnnnnnnnnnnnnnnnnnnnnnnnnnnnnnnnnnnnnnnnnnnnnnnnnnnnnnnnnnnnnnnnnnnnnnnnnnnnnnnnnnnnnnnnnnnnnnnnnnnnnnnnnnnnnnnnnnnnnnnnnnnnnnnnnnnnnnnnnnnnnnnnnnnnnnnnnnnnnnnnnnnnnnnnnnnnnnnnnnnnnnnnnnnnnnnnnnnnnnnnnnnnnnnnnnnnnnnnnnnnnnnnnnnnnnnnnnnnnnnnnnnnnnnnnnnnnnnnnnnnnnnnnnnnnnnnnnnnnnnnnnnnnnnnnnnnnnnnnnnnnnnnnnnnnnnnnnnnnnnnnnnnnnnnnnnnnnnnnnnnnnnnnnnnnnnnnnnnnnnnnnnnnnnnnnnnnnnnnnnnnnnnnnnnnnnnnnnnnnnnnnnnnnnnnnnnnnnnnnnnnnnnnnnnnnnnnnnnnnnnnnnnnnnnnnnnnnnnnnnnnnnnnnnnnnnnnnnnnnnnnnnnnnnnnnnnnnnnnnnnnnnnnnnnnnnnnnnnnnnnnnnnnnnnnnnnnnnnnnnnnnnnnnnnnnnnnnnnnnnnnnnnnnnnnnnnnnnnnnnnnnnnnnnnnnnnnnnnnnnnnnnnnnnnnnnnnnnnnnnnnnnnnnnnnnnnnnnnnnnnnnnnnnnnnnnnnnnnnnnnnnnnnnnnnnnnnnnnnnnnnnnnnnnnnnnnnnnnnnnnnnnnnnnnnnnnnnnnnnnnnnnnnnnnnnnnnnnnnnnnnnnnnnnnnnnnnnnnnnnnnnnnnnnnnnnnnnnnnnnnnnnnnnnnnnnnnnnnnnnnnnnnnnnnnnnnnnnnnnnnnnnnnnnnnnnnnnnnnnnnnnnnnnnnnnnnnnnnnnnnnnnnnnnnnnnnnnnnnnnnnnnnnnnnnnnnnnnnnnnnnnnnnnnnnnnnnnnnnnnnnnnnnnnnnnnnnnnnnnnnnnnnnnnnnnnnnnnnnnnnnnnnnnnnnnnnnnnnnnnnnnnnnnnnnnnnnnnnnnnnnnnnnnnnnnnnnnnnnnnnnnnnnnnnnnnnnnnnnnnnnnnnnnnnnnnnnnnnnnnnnnnnnnnnnnnnnnnnnnnnnnnnnnnnnnnnnnnnnnnnnnnnnnnnnnnnnnnnnnnnnnnnnnnnnnnnnnnnnnnnnnnnnnnnnnnnnnnnnnnnnnnnnnnnnnnnnnnnnnnnnnnnnnnnnnnnnnnnnnnnnnnnnnnnnnnnnnnnnnnnnnnnnnnnnnnnnnnnnnnnnnnnnnnnnnnnnnnnnnnnnnnnnnnnnnnnnnnnnnnnnnnnnnnnnnnnnnnnnnnnnnnnnnnnnnnnnnnnnnnnnnnnnnnnnnnnnnnnnnnnnnnnnnnnnnnnnnnnnnnnnnnnnnnnnnnnnnnnnnnnnnnnnnnnnnnnnnnnnnnnnnnnnnnnnnnnnnnnnnnnnnnnnnnnnnnnnnnnnnnnnnnnnnnnnnnnnnnnnnnnnnnnnnnnnnnnnnnnnnnnnnnnnnnnnnnnnnnnnnnnnnnnnnnnnnnnnnnnnnnnnnnnnnnnnnnnnnnnnnnnnnnnnnnnnnnnnnnnnnnnnnnnnnnnnnnnnnnnnnnnnnnnnnnnnnnnnnnnnnnnnnnnnnnnnnnnnnnnnnnnnnnnnnnnnnnnnnnnnnnnnnnnnnnnnnnnnnnnnnnnnnnnnnnnnnnnnnnnnnnnnnnnnnnnnnnnnnnnnnnnnnnnnnnnnnnnnnnnnnnnnnnnnnnnnnnnnnnnnnnnnnnnnnnnnnnnnnnnnnnnnnnnnnnnnnnnnnnnnnnnnnnnnnnnnnnnnnnnnnnnnnnnnnnnnnnnnnnnnnnnnnnnnnnnnnnnnnnnnnnnnnnnnnnnnnnnnnnnnnnnnnnnnnnnnnnnnnnnnnnnnnnnnnnnnnnnnnnnnnnnnnnnnnnnnnnnnnnnnnnnnnnnnnnnnnnnnnnnnnnnnnnnnnnnnnnnnnnnnnnnnnnnnnnnnnnnnnnnnnnnnnnnnnnnnnnnnnnnnnnnnnnnnnnnnnnnnnnnnnnnnnnnnnnnnnnnnnnnnnnnnnnnnnnnnnnnnnnnnnnnnnnnnnnnnnnnnnnnnnnnnnnnnnnnnnnnnnnnnnnnnnnnnnnnnnnnnnnnnnnnnnnnnnnnnnnnnnnnnnnnnnnnnnnnnnnnnnnnnnnnnnnnnnnnnnnnnnnnnnnnnnnnnnnnnnnnnnnnnnnnnnnnnnnnnnnnnnnnnnnnnnnnnnnnnnnnnnnnnnnnnnnnnnnnnnnnnnnnnnnnnnnnnnnnnnnnnnnnnnnnnnnnnnnnnnnnnnnnnnnnnnnnnnnnnnnnnnnnnnnnnnnnnnnnnnnnnnnnnnnnnnnnnnnnnnnnnnnnnnnnnnnnnnnnnnnnnnnnnnnnnnnnnnnnnnnnnnnnnnnnnnnnnnnnnnnnnnnnnnnnnnnnnnnnnnnnnnnnnnnnnnnnnnnnnnnnnnnnnnnnnnnnnnnnnnnnnnnnnnnnnnnnnnnnnnnnnnnnnnnnnnnnnnnnnnnnnnnnnnnnnnnnnnnnnnnnnnnnnnnnnnnnnnnnnnnnnnnnnnnnnnnnnnnnnnnnnnnnnnnnnnnnnnnnnnnnnnnnnnnnnnnnnnnnnnnnnnnnnnnnnnnnnnnnnnnnnnnnnnnnnnnnnnnnnnnnnnnnnnnnnnnnnnnnnnnnnnnnnnnnnnnnnnnnnnnnnnnnnnnnnnnnnnnnnnnnnnnnnnnnnnnnnnnnnnnnnnnnnnnnnnnnnnnnnnnnnnnnnnnnnnnnnnnnnnnnnnnnnnnnnnnnnnnnnnnnnnnnnnnnnnnnnnnnnnnnnnnnnnnnnnnnnnnnnnnnnnnnnnnnnnnnnnnnnnnnnnnnnnnnnnnnnnnnnnnnnnnnnnnnnnnnnnnnnnnnnnnnnnnnnnnnnnnnnnnnnnnnnnnnnnnnnnnnnnnnnnnnnnnnnnnnnnnnnnnnnnnnnnnnnnnnnnnnnnnnnnnnnnnnnnnnnnnnnnnnnnnnnnnnnnnnnnnnnnnnnnnnnnnnnnnnnnnnnnnnnnnnnnnnnnnnnnnnnnnnnnnnnnnnnnnnnnnnnnnnnnnnnnnnnnnnnnnnnnnnnnnnnnnnnnnnnnnnnnnnnnnnnnnnnnnnnnnnnnnnnnnnnnnnnnnnnnnnnnnnnnnnnnnnnnnnnnnnnnnnnnnnnnnnnnnnnnnnnnnnnnnnnnnnnnnnnnnnnnnnnnnnnnnnnnnnnnnnnnnnnnnnnnnnnnnnnnnnnnnnnnnnnnnnnnnnnnnnnnnnnnnnnnnnnnnnnnnnnnnnnnnnnnnnnnnnnnnnnnnnnnnnnnnnnnnnnnnnnnnnnnnnnnnnnnnnnnnnnnnnnnnnnnnnnnnnnnnnnnnnnnnnnnnnnnnnnnnnnnnnnnnnnnnnnnnnnnnnnnnnnnnnnnnnnnnnnnnnnnnnnnnnnnnnnnnnnnnnnnnnnnnnnnnnnnnnnnnnnnnnnnnnnnnnnnnnnnnnnnnnnnnnnnnnnnnnnnnnnnnnnnnnnnnnnnnnnnnnnnnnnnnnnnnnnnnnnnnnnnnnnnnnnnnnnnnnnnnnnnnnnnnnnnnnnnnnnnnnnnnnnnnnnnnnnnnnnnnnnnnnnnnnnnnnnnnnnnnnnnnnnnnnnnnnnnnnnnnnnnnnnnnnnnnnnnnnnnnnnnnnnnnnnnnnnnnnnnnnnnnnnnnnnnnnnnnnnnnnnnnnnnnnnnnnnnnnnnnnnnnnnnnnnnnnnnnnnnnnnnnnnnnnnnnnnnnnnnnnnnnnnnnnnnnnnnnnnnnnnnnnnnnnnnnnnnnnnnnnnnnnnnnnnnnnnnnnnnnnnnnnnnnnnnnnnnnnnnnnnnnnnnnnnnnnnnnnnnnnnnnnnnnnnnnnnnnnnnnnnnnnnnnnnnnnnnnnnnnnnnnnnnnnnnnnnnnnnnnnnnnnnnnnnnnnnnnnnnnnnnnnnnnnnnnnnnnnnnnnnnnnnnnnnnnnnnnnnnnnnnnnnnnnnnnnnnnnnnnnnnnnnnnnnnnnnnnnnnnnnnnnnnnnnnnnnnnnnnnnnnnnnnnnnnnnnnnnnnnnnnnnnnnnnnnnnnnnnnnnnnnnnnnnnnnnnnnnnnnnnnnnnnnnnnnnnnnnnnnnnnnnnnnnnnnnnnnnnnnnnnnnnnnnnnnnnnnnnnnnnnnnnnnnnnnnnnnnnnnnnnnnnnnnnnnnnnnnnnnnnnnnnnnnnnnnnnnnnnnnnnnnnnnnnnnnnnnnnnnnnnnnnnnnnnnnnnnnnnnnnnnnnnnnnnnnnnnnnnnnnnnnnnnnnnnnnnnnnnnnnnnnnnnnnnnnnnnnnnnnnnnnnnnnnnnnnnnnnnnnnnnnnnnnnnnnnnnnnnnnnnnnnnnnnnnnnnnnnnnnnnnnnnnnnnnnnnnnnnnnnnnnnnnnnnnnnnnnnnnnnnnnnnnnnnnnnnnnnnnnnnnnnnnnnnnnnnnnnnnnnnnnnnnnnnnnnnnnnnnnnnnnnnnnnnnnnnnnnnnnnnnnnnnnnnnnnnnnnnnnnnnnnnnnnnnnnnnnnnnnnnnnnnnnnnnnnnnnnnnnnnnnnnnnnnnnnnnnnnnnnnnnnnnnnnnnnnnnnnnnnnnnnnnnnnnnnnnnnnnnnnnnnnnnnnnnnnnnnnnnnnnnnnnnnnnnnnnnnnnnnnnnnnnnnnnnnnnnnnnnnnnnnnnnnnnnnnnnnnnnnnnnnnnnnnnnnnnnnnnnnnnnnnnnnnnnnnnnnnnnnnnnnnnnnnnnnnnnnnnnnnnnnnnnnnnnnnnnnnnnnnnnnnnnnnnnnnnnnnnnnnnnnnnnnnnnnnnnnnnnnnnnnnnnnnnnnnnnnnnnnnnnnnnnnnnnnnnnnnnnnnnnnnnnnnnnnnnnnnnnnnnnnnnnnnnnnnnnnnnnnnnnnnnnnnnnnnnnnnnnnnnnnnnnnnnnnnnnnnnnnnnnnnnnnnnnnnnnnnnnnnnnnnnnnnnnnnnnnnnnnnnnnnnnnnnnnnnnnnnnnnnnnnnnnnnnnnnnnnnnnnnnnnnnnnnnnnnnnnnnnnnnnnnnnnnnnnnnnnnnnnnnnnnnnnnnnnnnnnnnnnnnnnnnnnnnnnnnnnnnnnnnnnnnnnnnnnnnnnnnnnnnnnnnnnnnnnnnnnnnnnnnnnnnnnnnnnnnnnnnnnnnnnnnnnnnnnnnnnnnnnnnnnnnnnnnnnnnnnnnnnnnnnnnnnnnnnnnnnnnnnnnnnnnnnnnnnnnnnnnnnnnnnnnnnnnnnnnnnnnnnnnnnnnnnnnnnnnnnnnnnnnnnnnnnnnnnnnnnnnnnnnnnnnnnnnnnnnnnnnnnnnnnnnnnnnnnnnnnnnnnnnnnnnnnnnnnnnnnnnnnnnnnnnnnnnnnnnnnnnnnnnnnnnnnnnnnnnnnnnnnnnnnnnnnnnnnnnnnnnnnnnnnnnnnnnnnnnnnnnnnnnnnnnnnnnnnnnnnnnnnnnnnnnnnnnnnnnnnnnnnnnnnnnnnnnnnnnnnnnnnnnnnnnnnnnnnnnnnnnnnnnnnnnnnnnnnnnnnnnnnnnnnnnnnnnnnnnnnnnnnnnnnnnnnnnnnnnnnnnnnnnnnnnnnnnnnnnnnnnnnnnnnnnnnnnnnnnnnnnnnnnnnnnnnnnnnnnnnnnnnnnnnnnnnnnnnnnnnnnnnnnnnnnnnnnnnnnnnnnnnnnnnnnnnnnnnnnnnnnnnnnnnnnnnnnnnnnnnnnnnnnnnnnnnnnnnnnnnnnnnnnnnnnnnnnnnnnnnnnnnnnnnnnnnnnnnnnnnnnnnnnnnnnnnnnnnnnnnnnnnnnnnnnnnnnnnnnnnnnnnnnnnnnnnnnnnnnnnnnnnnnnnnnnnnnnnnnnnnnnnnnnnnnnnnnnnnnnnnnnnnnnnnnnnnnnnnnnnnnnnnnnnnnnnnnnnnnnnnnnnnnnnnnnnnnnnnnnnnnnnnnnnnnnnnnnnnnnnnnnnnnnnnnnnnnnnnnnnnnnnnnnnnnnnnnnnnnnnnnnnnnnnnnnnnnnnnnnnnnnnnnnnnnnnnnnnnnnnnnnnnnnnnnnnnnnnnnnnnnnnnnnnnnnnnnnnnnnnnnnnnnnnnnnnnnnnnnnnnnnnnnnnnnnnnnnnnnnnnnnnnnnnnnnnnnnnnnnnnnnnnnnnnnnnnnnnnnnnnnnnnnnnnnnnnnnnnnnnnnnnnnnnnnnnnnnnnnnnnnnnnnnnnnnnnnnnnnnnnnnnnnnnnnnnnnnnnnnnnnnnnnnnnnnnnnnnnnnnnnnnnnnnnnnnnnnnnnnnnnnnnnnnnnnnnnnnnnnnnnnnnnnnnnnnnnnnnnnnnnnnnnnnnnnnnnnnnnnnnnnnnnnnnnnnnnnnnnnnnnnnnnnnnnnnnnnnnnnnnnnnnnnnnnnnnnnnnnnnnnnnnnnnnnnnnnnnnnnnnnnnnnnnnnnnnnnnnnnnnnnnnnnnnnnnnnnnnnnnnnnnnnnnnnnnnnnnnnnnnnnnnnnnnnnnnnnnnnnnnnnnnnnnnnnnnnnnnnnnnnnnnnnnnnnnnnnnnnnnnnnnnnnnnnnnnnnnnnnnnnnnnnnnnnnnnnnnnnnnnnnnnnnnnnnnnnnnnnnnnnnnnnnnnnnnnnnnnnnnnnnnnnnnnnnnnnnnnnnnnnnnnnnnnnnnnnnnnnnnnnnnnnnnnnnnnnnnnnnnnnnnnnnnnnnnnnnnnnnnnnnnnnnnnnnnnnnnnnnnnnnnnnnnnnnnnnnnnnnnnnnnnnnnnnnnnnnnnnnnnnnnnnnnnnnnnnnnnnnnnnnnnnnnnnnnnnnnnnnnnnnnnnnnnnnnnnnnnnnnnnnnnnnnnnnnnnnnnnnnnnnnnnnnnnnnnnnnnnnnnnnnnnnnnnnnnnnnnnnnnnnnnnnnnnnnnnnnnnnnnnnnnnnnnnnnnnnnnnnnnnnnnnnnnnnnnnnnnnnnnnnnnnnnnnnnnnnnnnnnnnnnnnnnnnnnnnnnnnnnnnnnnnnnnnnnnnnnnnnnnnnnnnnnnnnnnnnnnnnnnnnnnnnnnnnnnnnnnnnnnnnnnnnnnnnnnnnnnnnnnnnnnnnnnnnnnnnnnnnnnnnnnnnnnnnnnnnnnnnnnnnnnnnnnnnnnnnnnnnnnnnnnnnnnnnnnnnnnnnnnnnnnnnnnnnnnnnnnnnnnnnnnnnnnnnnnnnnnnnnnnnnnnnnnnnnnnnnnnnnnnnnnnnnnnnnnnnnnnnnnnnnnnnnnnnnnnnnnnnnnnnnnnnnnnnnnnnnnnnnnnnnnnnnnnnnnnnnnnnnnnnnnnnnnnnnnnnnnnnnnnnnnnnnnnnnnnnnnnnnnnnnnnnnnnnnnnnnnnnnnnnnnnnnnnnnnnnnnnnnnnnnnnnnnnnnnnnnnnnnnnnnnnnnnnnnnnnnnnnnnnnnnnnnnnnnnnnnnnnnnnnnnnnnnnnnnnnnnnnnnnnnnnnnnnnnnnnnnnnnnnnnnnnnnnnnnnnnnnnnnnnnnnnnnnnnnnnnnnnnnnnnnnnnnnnnnnnnnnnnnnnnnnnnnnnnnnnnnnnnnnnnnnnnnnnnnnnnnnnnnnnnnnnnnnnnnnnnnnnnnnnnnnnnnnnnnnnnnnnnnnnnnnnnnnnnnnnnnnnnnnnnnnnnnnnnnnnnnnnnnnnnnnnnnnnnnnnnnnnnnnnnnnnnnnnnnnnnnnnnnnnnnnnnnnnnnnnnnnnnnnnnnnnnnnnnnnnnnnnnnnnnnnnnnnnnnnnnnnnnnnnnnnnnnnnnnnnnnnnnnnnnnnnnnnnnnnnnnnnnnnnnnnnnnnnnnnnnnnnnnnnnnnnnnnnnnnnnnnnnnnnnnnnnnnnnnnnnnnnnnnnnnnnnnnnnnnnnnnnnnnnnnnnnnnnnnnnnnnnnnnnnnnnnnnnnnnnnnnnnnnnnnnnnnnnnnnnnnnnnnnnnnnnnnnnnnnnnnnnnnnnnnnnnnnnnnnnnnnnnnnnnnnnnnnnnnnnnnnnnnnnnnnnnnnnnnnnnnnnnnnnnnnnnnnnnnnnnnnnnnnnnnnnnnnnnnnnnnnnnnnnnnnnnnnnnnnnnnnnnnnnnnnnnnnnnnnnnnnnnnnnnnnnnnnnnnnnnnnnnnnnnnnnnnnnnnnnnnnnnnnnnnnnnnnnnnnnnnnnnnnnnnnnnnnnnnnnnnnnnnnnnnnnnnnnnnnnnnnnnnnnnnnnnnnnnnnnnnnnnnnnnnnnnnnnnnnnnnnnnnnnnnnnnnnnnnnnnnnnnnnnnnnnnnnnnnnnnnnnnnnnnnnnnnnnnnnnnnnnnnnnnnnnnnnnnnnnnnnnnnnnnnnnnnnnnnnnnnnnnnnnnnnnnnnnnnnnnnnnnnnnnnnnnnnnnnnnnnnnnnnnnnnnnnnnnnnnnnnnnnnnnnnnnnnnnnnnnnnnnnnnnnnnnnnnnnnnnnnnnnnnnnnnnnnnnnnnnnnnnnnnnnnnnnnnnnnnnnnnnnnnnnnnnnnnnnnnnnnnnnnnnnnnnnnnnnnnnnnnnnnnnnnnnnnnnnnnnnnnnnnnnnnnnnnnnnnnnnnnnnnnnnnnnnnnnnnnnnnnnnnnnnnnnnnnnnnnnnnnnnnnnnnnnnnnnnnnnnnnnnnnnnnnnnnnnnnnnnnnnnnnnnnnnnnnnnnnnnnnnnnnnnnnnnnnnnnnnnnnnnnnnnnnnnnnnnnnnnnnnnnnnnnnnnnnnnnnnnnnnnnnnnnnnnnnnnnnnnnnnnnnnnnnnnnnnnnnnnnnnnnnnnnnnnnnnnnnnnnnnnnnnnnnnnnnnnnnnnnnnnnnnnnnnnnnnnnnnnnnnnnnnnnnnnnnnnnnnnnnnnnnnnnnnnnnnnnnnnnnnnnnnnnnnnnnnnnnnnnnnnnnnnnnnnnnnnnnnnnnnnnnnnnnnnnnnnnnnnnnnnnnnnnnnnnnnnnnnnnnnnnnnnnnnnnnnnnnnnnnnnnnnnnnnnnnnnnnnnnnnnnnnnnnnnnnnnnnnnnnnnnnnnnnnnnnnnnnnnnnnnnnnnnnnnnnnnnnnnnnnnnnnnnnnnnnnnnnnnnnnnnnnnnnnnnnnnnnnnnnnnnnnnnnnnnnnnnnnnnnnnnnnnnnnnnnnnnnnnnnnnnnnnnnnnnnnnnnnnnnnnnnnnnnnnnnnnnnnnnnnnnnnnnnnnnnnnnnnnnnnnnnnnnnnnnnnnnnnnnnnnnnnnnnnnnnnnnnnnnnnnnnnnnnnnnnnnnnnnnnnnnnnnnnnnnnnnnnnnnnnnnnnnnnnnnnnnnnnnnnnnnnnnnnnnnnnnnnnnnnnnnnnnnnnnnnnnnnnnnnnnnnnnnnnnnnnnnnnnnnnnnnnnnnnnnnnnnnnnnnnnnnnnnnnnnnnnnnnnnnnnnnnnnnnnnnnnnnnnnnnnnnnnnnnnnnnnnnnnnnnnnnnnnnnnnnnnnnnnnnnnnnnnnnnnnnnnnnnnnnnnnnnnnnnnnnnnnnnnnnnnnnnnnnnnnnnnnnnnnnnnnnnnnnnnnnnnnnnnnnnnnnnnnnnnnnnnnnnnnnnnnnnnnnnnnnnnnnnnnnnnnnnnnnnnnnnnnnnnnnnnnnnnnnnnnnnnnnnnnnnnnnnnnnnnnnnnnnnnnnnnnnnnnnnnnnnnnnnnnnnnnnnnnnnnnnnnnnnnnnnnnnnnnnnnnnnnnnnnnnnnnnnnnnnnnnnnnnnnnnnnnnnnnnnnnnnnnnnnnnnnnnnnnnnnnnnnnnnnnnnnnnnnnnnnnnnnnnnnnnnnnnnnnnnnnnnnnnnnnnnnnnnnnnnnnnnnnnnnnnnnnnnnnnnnnnnnnnnnnnnnnnnnnnnnnnnnnnnnnnnnnnnnnnnnnnnnnnnnnnnnnnnnnnnnnnnnnnnnnnnnnnnnnnnnnnnnnnnnnnnnnnnnnnnnnnnnnnnnnnnnnnnnnnnnnnnnnnnnnnnnnnnnnnnnnnnnnnnnnnnnnnnnnnnnnnnnnnnnnnnnnnnnnnnnnnnnnnnnnnnnnnnnnnnnnnnnnnnnnnnnnnnnnnnnnnnnnnnnnnnnnnnnnnnnnnnnnnnnnnnnnnnnnnnnnnnnnnnnnnnnnnnnnnnnnnnnnnnnnnnnnnnnnnnnnnnnnnnnnnnnnnnnnnnnnnnnnnnnnnnnnnnnnnnnnnnnnnnnnnnnnnnnnnnnnnnnnnnnnnnnnnnnnnnnnnnnnnnnnnnnnnnnnnnnnnnnnnnnnnnnnnnnnnnnnnnnnnnnnnnnnnnnnnnnnnnnnnnnnnnnnnnnnnnnnnnnnnnnnnnnnnnnnnnnnnnnnnnnnnnnnnnnnnnnnnnnnnnnnnnnnnnnnnnnnnnnnnnnnnnnnnnnnnnnnnnnnnnnnnnnnnnnnnnnnnnnnnnnnnnnnnnnnnnnnnnnnnnnnnnnnnnnnnnnnnnnnnnnnnnnnnnnnnnnnnnnnnnnnnnnnnnnnnnnnnnnnnnnnnnnnnnnnnnnnnnnnnnnnnnnnnnnnnnnnnnnnnnnnnnnnnnnnnnnnnnnnnnnnnnnnnnnnnnnnnnnnnnnnnnnnnnnnnnnnnnnnnnnnnnnnnnnnnnnnnnnnnnnnnnnnnnnnnnnnnnnnnnnnnnnnnnnnnnnnnnnnnnnnnnnnnnnnnnnnnnnnnnnnnnnnnnnnnnnnnnnnnnnnnnnnnnnnnnnnnnnnnnnnnnnnnnnnnnnnnnnnnnnnnnnnnnnnnnnnnnnnnnnnnnnnnnnnnnnnnnnnnnnnnnnnnnnnnnnnnnnnnnnnnnnnnnnnnnnnnnnnnnnnnnnnnnnnnnnnnnnnnnnnnnnnnnnnnnnnnnnnnnnnnnnnnnnnnnnnnnnnnnnnnnnnnnnnnnnnnnnnnnnnnnnnnnnnnnnnnnnnnnnnnnnnnnnnnnnnnnnnnnnnnnnnnnnnnnnnnnnnnnnnnnnnnnnnnnnnnnnnnnnnnnnnnnnnnnnnnnnnnnnnnnnnnnnnnnnnnnnnnnnnnnnnnnnnnnnnnnnnnnnnnnnnnnnnnnnnnnnnnnnnnnnnnnnnnnnnnnnnnnnnnnnnnnnnnnnnnnnnnnnnnnnnnnnnnnnnnnnnnnnnnnnnnnnnnnnnnnnnnnnnnnnnnnnnnnnnnnnnnnnnnnnnnnnnnnnnnnnnnnnnnnnnnnnnnnnnnnnnnnnnnnnnnnnnnnnnnnnnnnnnnnnnnnnnnnnnnnnnnnnnnnnnnnnnnnnnnnnnnnnnnnnnnnnnnnnnnnnnnnnnnnnnnnnnnnnnnnnnnnnnnnnnnnnnnnnnnnnnnnnnnnnnnnnnnnnnnnnnnnnnnnnnnnnnnnnnnnnnnnnnnnnnnnnnnnnnnnnnnnnnnnnnnnnnnnnnnnnnnnnnnnnnnnnnnnnnnnnnnnnnnnnnnnnnnnnnnnnnnnnnnnnnnnnnnnnnnnnnnnnnnnnnnnnnnnnnnnnnnnnnnnnnnnnnnnnnnnnnnnnnnnnnnnnnnnnnnnnnnnnnnnnnnnnnnnnnnnnnnnnnnnnnnnnnnnnnnnnnnnnnnnnnnnnnnnnnnnnnnnnnnnnnnnnnnnnnnnnnnnnnnnnnnnnnnnnnnnnnnnnnnnnnnnnnnnnnnnnnnnnnnnnnnnnnnnnnnnnnnnnnnnnnnnnnnnnnnnnnnnnnnnnnnnnnnnnnnnnnnnnnnnnnnnnnnnnnnnnnnnnnnnnnnnnnnnnnnnnnnnnnnnnnnnnnnnnnnnnnnnnnnnnnnnnnnnnnnnnnnnnnnnnnnnnnnnnnnnnnnnnnnnnnnnnnnnnnnnnnnnnnnnnnnnnnnnnnnnnnnnnnnnnnnnnnnnnnnnnnnnnnnnnnnnnnnnnnnnnnnnnnnnnnnnnnnnnnnnnnnnnnnnnnnnnnnnnnnnnnnnnnnnnnnnnnnnnnnnnnnnnnnnnnnnnnnnnnnnnnnnnnnnnnnnnnnnnnnnnnnnnnnnnnnnnnnnnnnnnnnnnnnnnnnnnnnnnnnnnnnnnnnnnnnnnnnnnnnnnnnnnnnnnnnnnnnnnnnnnnnnnnnnnnnnnnnnnnnnnnnnnnnnnnnnnnnnnnnnnnnnnnnnnnnnnnnnnnnnnnnnnnnnnnnnnnnnnnnnnnnnnnnnnnnnnnnnnnnnnnnnnnnnnnnnnnnnnnnnnnnnnnnnnnnnnnnnnnnnnnnnnnnnnnnnnnnnnnnnnnnnnnnnnnnnnnnnnnnnnnnnnnnnnnnnnnnnnnnnnnnnnnnnnnnnnnnnnnnnnnnnnnnnnnnnnnnnnnnnnnnnnnnnnnnnnnnnnnnnnnnnnnnnnnnnnnnnnnnnnnnnnnnnnnnnnnnnnnnnnnnnnnnnnnnnnnnnnnnnnnnnnnnnnnnnnnnnnnnnnnnnnnnnnnnnnnnnnnnnnnnnnnnnnnnnnnnnnnnnnnnnnnnnnnnnnnnnnnnnnnnnnnnnnnnnnnnnnnnnnnnnnnnnnnnnnnnnnnnnnnnnnnnnnnnnnnnnnnnnnnnnnnnnnnnnnnnnnnnnnnnnnnnnnnnnnnnnnnnnnnnnnnnnnnnnnnnnnnnnnnnnnnnnnnnnnnnnnnnnnnnnnnnnnnnnnnnnnnnnnnnnnnnnnnnnnnnnnnnnnnnnnnnnnnnnnnnnnnnnnnnnnnnnnnnnnnnnnnnnnnnnnnnnnnnnnnnnnnnnnnnnnnnnnnnnnnnnnnnnnnnnnnnnnnnnnnnnnnnnnnnnnnnnnnnnnnnnnnnnnnnnnnnnnnnnnnnnnnnnnnnnnnnnnnnnnnnnnnnnnnnnnnnnnnnnnnnnnnnnnnnnnnnnnnnnnnnnnnnnnnnnnnnnnnnnnnnnnnnnnnnnnnnnnnnnnnnnnnnnnnnnnnnnnnnnnnnnnnnnnnnnnnnnnnnnnnnnnnnnnnnnnnnnnnnnnnnnnnnnnnnnnnnnnnnnnnnnnnnnnnnnnnnnnnnnnnnnnnnnnnnnnnnnnnnnnnnnnnnnnnnnnnnnnnnnnnnnnnnnnnnnnnnnnnnnnnnnnnnnnnnnnnnnnnnnnnnnnnnnnnnnnnnnnnnnnnnnnnnnnnnnnnnnnnnnnnnnnnnnnnnnnnnnnnnnnnnnnnnnnnnnnnnnnnnnnnnnnnnnnnnnnnnnnnnnnnnnnnnnnnnnnnnnnnnnnnnnnnnnnnnnnnnnnnnnnnnnnnnnnnnnnnnnnnnnnnnnnnnnnnnnnnnnnnnnnnnnnnnnnnnnnnnnnnnnnnnnnnnnnnnnnnnnnnnnnnnnnnnnnnnnnnnnnnnnnnnnnnnnnnnnnnnnnnnnnnnnnnnnnnnnnnnnnnnnnnnnnnnnnnnnnnnnnnnnnnnnnnnnnnnnnnnnnnnnnnnnnnnnnnnnnnnnnnnnnnnnnnnnnnnnnnnnnnnnnnnnnnnnnnnnnnnnnnnnnnnnnnnnnnnnnnnnnnnnnnnnnnnnnnnnnnnnnnnnnnnnnnnnnnnnnnnnnnnnnnnnnnnnnnnnnnnnnnnnnnnnnnnnnnnnnnnnnnnnnnnnnnnnnnnnnnnnnnnnnnnnnnnnnnnnnnnnnnnnnnnnnnnnnnnnnnnnnnnnnnnnnnnnnnnnnnnnnnnnnnnnnnnnnnnnnnnnnnnnnnnnnnnnnnnnnnnnnnnnnnnnnnnnnnnnnnnnnnnnnnnnnnnnnnnnnnnnnnnnnnnnnnnnnnnnnnnnnnnnnnnnnnnnnnnnnnnnnnnnnnnnnnnnnnnnnnnnnnnnnnnnnnnnnnnnnnnnnnnnnnnnnnnnnnnnnnnnnnnnnnnnnnnnnnnnnnnnnnnnnnnnnnnnnnnnnnnnnnnnnnnnnnnnnnnnnnnnnnnnnnnnnnnnnnnnnnnnnnnnnnnnnnnnnnnnnnnnnnnnnnnnnnnnnnnnnnnnnnnnnnnnnnnnnnnnnnnnnnnnnnnnnnnnnnnnnnnnnnnnnnnnnnnnnnnnnnnnnnnnnnnnnnnnnnnnnnnnnnnnnnnnnnnnnnnnnnnnnnnnnnnnnnnnnnnnnnnnnnnnnnnnnnnnnnnnnnnnnnnnnnnnnnnnnnnnnnnnnnnnnnnnnnnnnnnnnnnnnnnnnnnnnnnnnnnnnnnnnnnnnnnnnnnnnnnnnnnnnnnnnnnnnnnnnnnnnnnnnnnnnnnnnnnnnnnnnnnnnnnnnnnnnnnnnnnnnnnnnnnnnnnnnnnnnnnnnnnnnnnnnnnnnnnnnnnnnnnnnnnnnnnnnnnnnnnnnnnnnnnnnnnnnnnnnnnnnnnnnnnnnnnnnnnnnnnnnnnnnnnnnnnnnnnnnnnnnnnnnnnnnnnnnnnnnnnnnnnnnnnnnnnnnnnnnnnnnnnnnnnnnnnnnnnnnnnnnnnnnnnnnnnnnnnnnnnnnnnnnnnnnnnnnnnnnnnnnnnnnnnnnnnnnnnnnnnnnnnnnnnnnnnnnnnnnnnnnnnnnnnnnnnnnnnnnnnnnnnnnnnnnnnnnnnnnnnnnnnnnnnnnnnnnnnnnnnnnnnnnnnnnnnnnnnnnnnnnnnnnnnnnnnnnnnnnnnnnnnnnnnnnnnnnnnnnnnnnnnnnnnnnnnnnnnnnnnnnnnnnnnnnnnnnnnnnnnnnnnnnnnnnnnnnnnnnnnnnnnnnnnnnnnnnnnnnnnnnnnnnnnnnnnnnnnnnnnnnnnnnnnnnnnnnnnnnnnnnnnnnnnnnnnnnnnnnnnnnnnnnnnnnnnnnnnnnnnnnnnnnnnnnnnnnnnnnnnnnnnnnnnnnnnnnnnnnnnnnnnnnnnnnnnnnnnnnnnnnnnnnnnnnnnnnnnnnnnnnnnnnnnnnnnnnnnnnnnnnnnnnnnnnnnnnnnnnnnnnnnnnnnnnnnnnnnnnnnnnnnnnnnnnnnnnnnnnnnnnnnnnnnnnnnnnnnnnnnnnnnnnnnnnnnnnnnnnnnnnnnnnnnnnnnnnnnnnnnnnnnnnnnnnnnnnnnnnnnnnnnnnnnnnnnnnnnnnnnnnnnnnnnnnnnnnnnnnnnnnnnnnnnnnnnnnnnnnnnnnnnnnnnnnnnnnnnnnnnnnnnnnnnnnnnnnnnnnnnnnnnnnnnnnnnnnnnnnnnnnnnnnnnnnnnnnnnnnnnnnnnnnnnnnnnnnnnnnnnnnnnnnnnnnnnnnnnnnnnnnnnnnnnnnnnnnnnnnnnnnnnnnnnnnnnnnnnnnnnnnnnnnnnnnnnnnnnnnnnnnnnnnnnnnnnnnnnnnnnnnnnnnnnnnnnnnnnnnnnnnnnnnnnnnnnnnnnnnnnnnnnnnnnnnnnnnnnnnnnnnnnnnnnnnnnnnnnnnnnnnnnnnnnnnnnnnnnnnnnnnnnnnnnnnnnnnnnnnnnnnnnnnnnnnnnnnnnnnnnnnnnnnnnnnnnnnnnnnnnnnnnnnnnnnnnnnnnnnnnnnnnnnnnnnnnnnnnnnnnnnnnnnnnnnnnnnnnnnnnnnnnnnnnnnnnnnnnnnnnnnnnnnnnnnnnnnnnnnnnnnnnnnnnnnnnnnnnnnnnnnnnnnnnnnnnnnnnnnnnnnnnnnnnnnnnnnnnnnnnnnnnnnnnnnnnnnnnnnnnnnnnnnnnnnnnnnnnnnnnnnnnnnnnnnnnnnnnnnnnnnnnnnnnnnnnnnnnnnnnnnnnnnnnnnnnnnnnnnnnnnnnnnnnnnnnnnnnnnnnnnnnnnnnnnnnnnnnnnnnnnnnnnnnnnnnnnnnnnnnnnnnnnnnnnnnnnnnnnnnnnnnnnnnnnnnnnnnnnnnnnnnnnnnnnnnnnnnnnnnnnnnnnnnnnnnnnnnnnnnnnnnnnnnnnnnnnnnnnnnnnnnnnnnnnnnnnnnnnnnnnnnnnnnnnnnnnnnnnnnnnnnnnnnnnnnnnnnnnnnnnnnnnnnnnnnnnnnnnnnnnnnnnnnnnnnnnnnnnnnnnnnnnnnnnnnnnnnnnnnnnnnnnnnnnnnnnnnnnnnnnnnnnnnnnnnnnnnnnnnnnnnnnnnnnnnnnnnnnnnnnnnnnnnnnnnnnnnnnnnnnnnnnnnnnnnnnnnnnnnnnnnnnnnnnnnnnnnnnnnnnnnnnnnnnnnnnnnnnnnnnnnnnnnnnnnnnnnnnnnnnnnnnnnnnnnnnnnnnnnnnnnnnnnnnnnnnnnnnnnnnnnnnnnnnnnnnnnnnnnnnnnnnnnnnnnnnnnnnnnnnnnnnnnnnnnnnnnnnnnnnnnnnnnnnnnnnnnnnnnnnnnnnnnnnnnnnnnnnnnnnnnnnnnnnnnnnnnnnnnnnnnnnnnnnnnnnnnnnnnnnnnnnnnnnnnnnnnnnnnnnnnnnnnnnnnnnnnnnnnnnnnnnnnnnnnnnnnnnnnnnnnnnnnnnnnnnnnnnnnnnnnnnnnnnnnnnnnnnnnnnnnnnnnnnnnnnnnnnnnnnnnnnnnnnnnnnnnnnnnnnnnnnnnnnnnnnnnnnnnnnnnnnnnnnnnnnnnnnnnnnnnnnnnnnnnnnnnnnnnnnnnnnnnnnnnnnnnnnnnnnnnnnnnnnnnnnnnnnnnnnnnnnnnnnnnnnnnnnnnnnnnnnnnnnnnnnnnnnnnnnnnnnnnnnnnnnnnnnnnnnnnnnnnnnnnnnnnnnnnnnnnnnnnnnnnnnnnnnnnnnnnnnnnnnnnnnnnnnnnnnnnnnnnnnnnnnnnnnnnnnnnnnnnnnnnnnnnnnnnnnnnnnnnnnnnnnnnnnnnnnnnnnnnnnnnnnnnnnnnnnnnnnnnnnnnnnnnnnnnnnnnnnnnnnnnnnnnnnnnnnnnnnnnnnnnnnnnnnnnnnnnnnnnnnnnnnnnnnnnnnnnnnnnnnnnnnnnnnnnnnnnnnnnnnnnnnnnnnnnnnnnnnnnnnnnnnnnnnnnnnnnnnnnnnnnnnnnnnnnnnnnnnnnnnnnnnnnnnnnnnnnnnnnnnnnnnnnnnnnnnnnnnnnnnnnnnnnnnnnnnnnnnnnnnnnnnnnnnnnnnnnnnnnnnnnnnnnnnnnnnnnnnnnnnnnnnnnnnnnnnnnnnnnnnnnnnnnnnnnnnnnnnnnnnnnnnnnnnnnnnnnnnnnnnnnnnnnnnnnnnnnnnnnnnnnnnnnnnnnnnnnnnnnnnnnnnnnnnnnnnnnnnnnnnnnnnnnnnnnnnnnnnnnnnnnnnnnnnnnnnnnnnnnnnnnnnnnnnnnnnnnnnnnnnnnnnnnnnnnnnnnnnnnnnnnnnnnnnnnnnnnnnnnnnnnnnnnnnnnnnnnnnnnnnnnnnnnnnnnnnnnnnnnnnnnnnnnnnnnnnnnnnnnnnnnnnnnnnnnnnnnnnnnnnnnnnnnnnnnnnnnnnnnnnnnnnnnnnnnnnnnnnnnnnnnnnnnnnnnnnnnnnnnnnnnnnnnnnnnnnnnnnnnnnnnnnnnnnnnnnnnnnnnnnnnnnnnnnnnnnnnnnnnnnnnnnnnnnnnnnnnnnnnnnnnnnnnnnnnnnnnnnnnnnnnnnnnnnnnnnnnnnnnnnnnnnnnnnnnnnnnnnnnnnnnnnnnnnnnnnnnnnnnnnnnnnnnnnnnnnnnnnnnnnnnnnnnnnnnnnnnnnnnnnnnnnnnnnnnnnnnnnnnnnnnnnnnnnnnnnnnnnnnnnnnnnnnnnnnnnnnnnnnnnnnnnnnnnnnnnnnnnnnnnnnnnnnnnnnnnnnnnnnnnnnnnnnnnnnnnnnnnnnnnnnnnnnnnnnnnnnnnnnnnnnnnnnnnnnnnnnnnnnnnnnnnnnnnnnnnnnnnnnnnnnnnnnnnnnnnnnnnnnnnnnnnnnnnnnnnnnnnnnnnnnnnnnnnnnnnnnnnnnnnnnnnnnnnnnnnnnnnnnnnnnnnnnnnnnnnnnnnnnnnnnnnnnnnnnnnnnnnnnnnnnnnnnnnnnnnnnnnnnnnnnnnnnnnnnnnnnnnnnnnnnnnnnnnnnnnnnnnnnnnnnnnnnnnnnnnnnnnnnnnnnnnnnnnnnnnnnnnnnnnnnnnnnnnnnnnnnnnnnnnnnnnnnnnnnnnnnnnnnnnnnnnnnnnnnnnnnnnnnnnnnnnnnnnnnnnnnnnnnnnnnnnnnnnnnnnnnnnnnnnnnnnnnnnnnnnnnnnnnnnnnnnnnnnnnnnnnnnnnnnnnnnnnnnnnnnnnnnnnnnnnnnnnnnnnnnnnnnnnnnnnnnnnnnnnnnnnnnnnnnnnnnnnnnnnnnnnnnnnnnnnnnnnnnnnnnnnnnnnnnnnnnnnnnnnnnnnnnnnnnnnnnnnnnnnnnnnnnnnnnnnnnnnnnnnnnnnnnnnnnnnnnnnnnnnnnnnnnnnnnnnnnnnnnnnnnnnnnnnnnnnnnnnnnnnnnnnnnnnnnnnnnnnnnnnnnnnnnnnnnnnnnnnnnnnnnnnnnnnnnnnnnnnnnnnnnnnnnnnnnnnnnnnnnnnnnnnnnnnnnnnnnnnnnnnnnnnnnnnnnnnnnnnnnnnnnnnnnnnnnnnnnnnnnnnnnnnnnnnnnnnnnnnnnnnnnnnnnnnnnnnnnnnnnnnnnnnnnnnnnnnnnnnnnnnnnnnnnnnnnnnnnnnnnnnnnnnnnnnnnnnnnnnnnnnnnnnnnnnnnnnnnnnnnnnnnnnnnnnnnnnnnnnnnnnnnnnnnnnnnnnnnnnnnnnnnnnnnnnnnnnnnnnnnnnnnnnnnnnnnnnnnnnnnnnnnnnnnnnnnnnnnnnnnnnnnnnnnnnnnnnnnnnnnnnnnnnnnnnnnnnnnnnnnnnnnnnnnnnnnnnnnnnnnnnnnnnnnnnnnnnnnnnnnnnnnnnnnnnnnnnnnnnnnnnnnnnnnnnnnnnnnnnnnnnnnnnnnnnnnnnnnnnnnnnnnnnnnnnnnnnnnnnnnnnnnnnnnnnnnnnnnnnnnnnnnnnnnnnnnnnnnnnnnnnnnnnnnnnnnnnnnnnnnnnnnnnnnnnnnnnnnnnnnnnnnnnnnnnnnnnnnnnnnnnnnnnnnnnnnnnnnnnnnnnnnnnnnnnnnnnnnnnnnnnnnnnnnnnnnnnnnnnnnnnnnnnnnnnnnnnnnnnnnnnnnnnnnnnnnnnnnnnnnnnnnnnnnnnnnnnnnnnnnnnnnnnnnnnnnnnnnnnnnnnnnnnnnnnnnnnnnnnnnnnnnnnnnnnnnnnnnnnnnnnnnnnnnnnnnnnnnnnnnnnnnnnnnnnnnnnnnnnnnnnnnnnnnnnnnnnnnnnnnnnnnnnnnnnnnnnnnnnnnnnnnnnnnnnnnnnnnnnnnnnnnnnnnnnnnnnnnnnnnnnnnnnnnnnnnnnnnnnnnnnnnnnnnnnnnnnnnnnnnnnnnnnnnnnnnnnnnnnnnnnnnnnnnnnnnnnnnnnnnnnnnnnnnnnnnnnnnnnnnnnnnnnnnnnnnnnnnnnnnnnnnnnnnnnnnnnnnnnnnnnnnnnnnnnnnnnnnnnnnnnnnnnnnnnnnnnnnnnnnnnnnnnnnnnnnnnnnnnnnnnnnnnnnnnnnnnnnnnnnnnnnnnnnnnnnnnnnnnnnnnnnnnnnnnnnnnnnnnnnnnnnnnnnnnnnnnnnnnnnnnnnnnnnnnnnnnnnnnnnnnnnnnnnnnnnnnnnnnnnnnnnnnnnnnnnnnnnnnnnnnnnnnnnnnnnnnnnnnnnnnnnnnnnnnnnnnnnnnnnnnnnnnnnnnnnnnnnnnnnnnnnnnnnnnnnnnnnnnnnnnnnnnnnnnnnnnnnnnnnnnnnnnnnnnnnnnnnnnnnnnnnnnnnnnnnnnnnnnnnnnnnnnnnnnnnnnnnnnnnnnnnnnnnnnnnnnnnnnnnnnnnnnnnnnnnnnnnnnnnnnnnnnnnnnnnnnnnnnnnnnnnnnnnnnnnnnnnnnnnnnnnnnnnnnnnnnnnnnnnnnnnnnnnnnnnnnnnnnnnnnnnnnnnnnnnnnnnnnnnnnnnnnnnnnnnnnnnnnnnnnnnnnnnnnnnnnnnnnnnnnnnnnnnnnnnnnnnnnnnnnnnnnnnnnnnnnnnnnnnnnnnnnnnnnnnnnnnnnnnnnnnnnnnnnnnnnnnnnnnnnnnnnnnnnnnnnnnnnnnnnnnnnnnnnnnnnnnnnnnnnnnnnnnnnnnnnnnnnnnnnnnnnnnnnnnnnnnnnnnnnnnnnnnnnnnnnnnnnnnnnnnnnnnnnnnnnnnnnnnnnnnnnnnnnnnnnnnnnnnnnnnnnnnnnnnnnnnnnnnnnnnnnnnnnnnnnnnnnnnnnnnnnnnnnnnnnnnnnnnnnnnnnnnnnnnnnnnnnnnnnnnnnnnnnnnnnnnnnnnnnnnnnnnnnnnnnnnnnnnnnnnnnnnnnnnnnnnnnnnnnnnnnnnnnnnnnnnnnnnnnnnnnnnnnnnnnnnnnnnnnnnnnnnnnnnnnnnnnnnnnnnnnnnnnnnnnnnnnnnnnnnnnnnnnnnnnnnnnnnnnnnnnnnnnnnnnnnnnnnnnnnnnnnnnnnnnnnnnnnnnnnnnnnnnnnnnnnnnnnnnnnnnnnnnnnnnnnnnnnnnnnnnnnnnnnnnnnnnnnnnnnnnnnnnnnnnnnnnnnnnnnnnnnnnnnnnnnnnnnnnnnnnnnnnnnnnnnnnnnnnnnnnnnnnnnnnnnnnnnnnnnnnnnnnnnnnnnnnnnnnnnnnnnnnnnnnnnnnnnnnnnnnnnnnnnnnnnnnnnnnnnnnnnnnnnnnnnnnnnnnnnnnnnnnnnnnnnnnnnnnnnnnnnnnnnnnnnnnnnnnnnnnnnnnnnnnnnnnnnnnnnnnnnnnnnnnnnnnnnnnnnnnnnnnnnnnnnnnnnnnnnnnnnnnnnnnnnnnnnnnnnnnnnnnnnnnnnnnnnnnnnnnnnnnnnnnnnnnnnnnnnnnnnnnnnnnnnnnnnnnnnnnnnnnnnnnnnnnnnnnnnnnnnnnnnnnnnnnnnnnnnnnnnnnnnnnnnnnnnnnnnnnnnnnnnnnnnnnnnnnnnnnnnnnnnnnnnnnnnnnnnnnnnnnnnnnnnnnnnnnnnnnnnnnnnnnnnnnnnnnnnnnnnnnnnnnnnnnnnnnnnnnnnnnnnnnnnnnnnnnnnnnnnnnnnnnnnnnnnnnnnnnnnnnnnnnnnnnnnnnnnnnnnnnnnnnnnnnnnnnnnnnnnnnnnnnnnnnnnnnnnnnnnnnnnnnnnnnnnnnnnnnnnnnnnnnnnnnnnnnnnnnnnnnnnnnnnnnnnnnnnnnnnnnnnnnnnnnnnnnnnnnnnnnnnnnnnnnnnnnnnnnnnnnnnnnnnnnnnnnnnnnnnnnnnnnnnnnnnnnnnnnnnnnnnnnnnnnnnnnnnnnnnnnnnnnnnnnnnnnnnnnnnnnnnnnnnnnnnnnnnnnnnnnnnnnnnnnnnnnnnnnnnnnnnnnnnnnnnnnnnnnnnnnnnnnnnnnnnnnnnnnnnnnnnnnnnnnnnnnnnnnnnnnnnnnnnnnnnnnnnnnnnnnnnnnnnnnnnnnnnnnnnnnnnnnnnnnnnnnnnnnnnnnnnnnnnnnnnnnnnnnnnnnnnnnnnnnnnnnnnnnnnnnnnnnnnnnnnnnnnnnnnnnnnnnnnnnnnnnnnnnnnnnnnnnnnnnnnnnnnnnnnnnnnnnnnnnnnnnnnnnnnnnnnnnnnnnnnnnnnnnnnnnnnnnnnnnnnnnnnnnnnnnnnnnnnnnnnnnnnnnnnnnnnnnnnnnnnnnnnnnnnnnnnnnnnnnnnnnnnnnnnnnnnnnnnnnnnnnnnnnnnnnnnnnnnnnnnnnnnnnnnnnnnnnnnnnnnnnnnnnnnnnnnnnnnnnnnnnnnnnnnnnnnnnnnnnnnnnnnnnnnnnnnnnnnnnnnnnnnnnnnnnnnnnnnnnnnnnnnnnnnnnnnnnnnnnnnnnnnnnnnnnnnnnnnnnnnnnnnnnnnnnnnnnnnnnnnnnnnnnnnnnnnnnnnnnnnnnnnnnnnnnnnnnnnnnnnnnnnnnnnnnnnnnnnnnnnnnnnnnnnnnnnnnnnnnnnnnnnnnnnnnnnnnnnnnnnnnnnnnnnnnnnnnnnnnnnnnnnnnnnnnnnnnnnnnnnnnnnnnnnnnnnnnnnnnnnnnnnnnnnnnnnnnnnnnnnnnnnnnnnnnnnnnnnnnnnnnnnnnnnnnnnnnnnnnnnnnnnnnnnnnnnnnnnnnnnnnnnnnnnnnnnnnnnnnnnnnnnnnnnnnnnnnnnnnnnnnnnnnnnnnnnnnnnnnnnnnnnnnnnnnnnnnnnnnnnnnnnnnnnnnnnnnnnnnnnnnnnnnnnnnnnnnnnnnnnnnnnnnnnnnnnnnnnnnnnnnnnnnnnnnnnnnnnnnnnnnnnnnnnnnnnnnnnnnnnnnnnnnnnnnnnnnnnnnnnnnnnnnnnnnnnnnnnnnnnnnnnnnnnnnnnnnnnnnnnnnnnnnnnnnnnnnnnnnnnnnnnnnnnnnnnnnnnnnnnnnnnnnnnnnnnnnnnnnnnnnnnnnnnnnnnnnnnnnnnnnnnnnnnnnnnnnnnnnnnnnnnnnnnnnnnnnnnnnnnnnnnnnnnnnnnnnnnnnnnnnnnnnnnnnnnnnnnnnnnnnnnnnnnnnnnnnnnnnnnnnnnnnnnnnnnnnnnnnnnnnnnnnnnnnnnnnnnnnnnnnnnnnnnnnnnnnnnnnnnnnnnnnnnnnnnnnnnnnnnnnnnnnnnnnnnnnnnnnnnnnnnnnnnnnnnnnnnnnnnnnnnnnnnnnnnnnnnnnnnnnnnnnnnnnnnnnnnnnnnnnnnnnnnnnnnnnnnnnnnnnnnnnnnnnnnnnnnnnnnnnnnnnnnnnnnnnnnnnnnnnnnnnnnnnnnnnnnnnnnnnnnnnnnnnnnnnnnnnnnnnnnnnnnnnnnnnnnnnnnnnnnnnnnnnnnnnnnnnnnnnnnnnnnnnnnnnnnnnnnnnnnnnnnnnnnnnnnnnnnnnnnnnnnnnnnnnnnnnnnnnnnnnnnnnnnnnnnnnnnnnnnnnnnnnnnnnnnnnnnnnnnnnnnnnnnnnnnnnnnnnnnnnnnnnnnnnnnnnnnnnnnnnnnnnnnnnnnnnnnnnnnnnnnnnnnnnnnnnnnnnnnnnnnnnnnnnnnnnnnnnnnnnnnnnnnnnnnnnnnnnnnnnnnnnnnnnnnnnnnnnnnnnnnnnnnnnnnnnnnnnnnnnnnnnnnnnnnnnnnnnnnnnnnnnnnnnnnnnnnnnnnnnnnnnnnnnnnnnnnnnnnnnnnnnnnnnnnnnnnnnnnnnnnnnnnnnnnnnnnnnnnnnnnnnnnnnnnnnnnnnnnnnnnnnnnnnnnnnnnnnnnnnnnnnnnnnnnnnnnnnnnnnnnnnnnnnnnnnnnnnnnnnnnnnnnnnnnnnnnnnnnnnnnnnnnnnnnnnnnnnnnnnnnnnnnnnnnnnnnnnnnnnnnnnnnnnnnnnnnnnnnnnnnnnnnnnnnnnnnnnnnnnnnnnnnnnnnnnnnnnnnnnnnnnnnnnnnnnnnnnnnnnnnnnnnnnnnnnnnnnnnnnnnnnnnnnnnnnnnnnnnnnnnnnnnnnnnnnnnnnnnnnnnnnnnnnnnnnnnnnnnnnnnnnnnnnnnnnnnnnnnnnnnnnnnnnnnnnnnnnnnnnnnnnnnnnnnnnnnnnnnnnnnnnnnnnnnnnnnnnnnnnnnnnnnnnnnnnnnnnnnnnnnnnnnnnnnnnnnnnnnnnnnnnnnnnnnnnnnnnnnnnnnnnnnnnnnnnnnnnnnnnnnnnnnnnnnnnnnnnnnnnnnnnnnnnnnnnnnnnnnnnnnnnnnnnnnnnnnnnnnnnnnnnnnnnnnnnnnnnnnnnnnnnnnnnnnnnnnnnnnnnnnnnnnnnnnnnnnnnnnnnnnnnnnnnnnnnnnnnnnnnnnnnnnnnnnnnnnnnnnnnnnnnnnnnnnnnnnnnnnnnnnnnnnnnnnnnnnnnnnnnnnnnnnnnnnnnnnnnnnnnnnnnnnnnnnnnnnnnnnnnnnnnnnnnnnnnnnnnnnnnnnnnnnnnnnnnnnnnnnnnnnnnnnnnnnnnnnnnnnnnnnnnnnnnnnnnnnnnnnnnnnnnnnnnnnnnnnnnnnnnnnnnnnnnnnnnnnnnnnnnnnnnnnnnnnnnnnnnnnnnnnnnnnnnnnnnnnnnnnnnnnnnnnnnnnnnnnnnnnnnnnnnnnnnnnnnnnnnnnnnnnnnnnnnnnnnnnnnnnnnnnnnnnnnnnnnnnnnnnnnnnnnnnnnnnnnnnnnnnnnnnnnnnnnnnnnnnnnnnnnnnnnnnnnnnnnnnnnnnnnnnnnnnnnnnnnnnnnnnnnnnnnnnnnnnnnnnnnnnnnnnnnnnnnnnnnnnnnnnnnnnnnnnnnnnnnnnnnnnnnnnnnnnnnnnnnnnnnnnnnnnnnnnnnnnnnnnnnnnnnnnnnnnnnnnnnnnnnnnnnnnnnnnnnnnnnnnnnnnnnnnnnnnnnnnnnnnnnnnnnnnnnnnnnnnnnnnnnnnnnnnnnnnnnnnnnnnnnnnnnnnnnnnnnnnnnnnnnnnnnnnnnnnnnnnnnnnnnnnnnnnnnnnnnnnnnnnnnnnnnnnnnnnnnnnnnnnnnnnnnnnnnnnnnnnnnnnnnnnnnnnnnnnnnnnnnnnnnnnnnnnnnnnnnnnnnnnnnnnnnnnnnnnnnnnnnnnnnnnnnnnnnnnnnnnnnnnnnnnnnnnnnnnnnnnnnnnnnnnnnnnnnnnnnnnnnnnnnnnnnnnnnnnnnnnnnnnnnnnnnnnnnnnnnnnnnnnnnnnnnnnnnnnnnnnnnnnnnnnnnnnnnnnnnnnnnnnnnnnnnnnnnnnnnnnnnnnnnnnnnnnnnnnnnnnnnnnnnnnnnnnnnnnnnnnnnnnnnnnnnnnnnnnnnnnnnnnnnnnnnnnnnnnnnnnnnnnnnnnnnnnnnnnnnnnnnnnnnnnnnnnnnnnnnnnnnnnnnnnnnnnnnnnnnnnnnnnnnnnnnnnnnnnnnnnnnnnnnnnnnnnnnnnnnnnnnnnnnnnnnnnnnnnnnnnnnnnnnnnnnnnnnnnnnnnnnnnnnnnnnnnnnnnnnnnnnnnnnnnnnnnnnnnnnnnnnnnnnnnnnnnnnnnnnnnnnnnnnnnnnnnnnnnnnnnnnnnnnnnnnnnnnnnnnnnnnnnnnnnnnnnnnnnnnnnnnnnnnnnnnnnnnnnnnnnnnnnnnnnnnnnnnnnnnnnnnnnnnnnnnnnnnnnnnnnnnnnnnnnnnnnnnnnnnnnnnnnnnnnnnnnnnnnnnnnnnnnnnnnnnnnnnnnnnnnnnnnnnnnnnnnnnnnnnnnnnnnnnnnnnnnnnnnnnnnnnnnnnnnnnnnnnnnnnnnnnnnnnnnnnnnnnnnnnnnnnnnnnnnnnnnnnnnnnnnnnnnnnnnnnnnnnnnnnnnnnnnnnnnnnnnnnnnnnnnnnnnnnnnnnnnnnnnnnnnnnnnnnnnnnnnnnnnnnnnnnnnnnnnnnnnnnnnnnnnnnnnnnnnnnnnnnnnnnnnnnnnnnnnnnnnnnnnnnnnnnnnnnnnnnnnnnnnnnnnnnnnnnnnnnnnnnnnnnnnnnnnnnnnnnnnnnnnnnnnnnnnnnnnnnnnnnnnnnnnnnnnnnnnnnnnnnnnnnnnnnnnnnnnnnnnnnnnnnnnnnnnnnnnnnnnnnnnnnnnnnnnnnnnnnnnnnnnnnnnnnnnnnnnnnnnnnnnnnnnnnnnnnnnnnnnnnnnnnnnnnnnnnnnnnnnnnnnnnnnnnnnnnnnnnnnnnnnnnnnnnnnnnnnnnnnnnnnnnnnnnnnnnnnnnnnnnnnnnnnnnnnnnnnnnnnnnnnnnnnnnnnnnnnnnnnnnnnnnnnnnnnnnnnnnnnnnnnnnnnnnnnnnnnnnnnnnnnnnnnnnnnnnnnnnnnnnnnnnnnnnnnnnnnnnnnnnnnnnnnnnnnnnnnnnnnnnnnnnnnnnnnnnnnnnnnnnnnnnnnnnnnnnnnnnnnnnnnnnnnnnnnnnnnnnnnnnnnnnnnnnnnnnnnnnnnnnnnnnnnnnnnnnnnnnnnnnnnnnnnnnnnnnnnnnnnnnnnnnnnnnnnnnnnnnnnnnnnnnnnnnnnnnnnnnnnnnnnnnnnnnnnnnnnnnnnnnnnnnnnnnnnnnnnnnnnnnnnnnnnnnnnnnnnnnnnnnnnnnnnnnnnnnnnnnnnnnnnnnnnnnnnnnnnnnnnnnnnnnnnnnnnnnnnnnnnnnnnnnnnnnnnnnnnnnnnnnnnnnnnnnnnnnnnnnnnnnnnnnnnnnnnnnnnnnnnnnnnnnnnnnnnnnnnnnnnnnnnnnnnnnnnnnnnnnnnnnnnnnnnnnnnnnnnnnnnnnnnnnnnnnnnnnnnnnnnnnnnnnnnnnnnnnnnnnnnnnnnnnnnnnnnnnnnnnnnnnnnnnnnnnnnnnnnnnnnnnnnnnnnnnnnnnnnnnnnnnnnnnnnnnnnnnnnnnnnnnnnnnnnnnnnnnnnnnnnnnnnnnnnnnnnnnnnnnnnnnnnnnnnnnnnnnnnnnnnnnnnnnnnnnnnnnnnnnnnnnnnnnnnnnnnnnnnnnnnnnnnnnnnnnnnnnnnnnnnnnnnnnnnnnnnnnnnnnnnnnnnnnnnnnnnnnnnnnnnnnnnnnnnnnnnnnnnnnnnnnnnnnnnnnnnnnnnnnnnnnnnnnnnnnnnnnnnnnnnnnnnnnnnnnnnnnnnnnnnnnnnnnnnnnnnnnnnnnnnnnnnnnnnnnnnnnnnnnnnnnnnnnnnnnnnnnnnnnnnnnnnnnnnnnnnnnnnnnnnnnnnnnnnnnnnnnnnnnnnnnnnnnnnnnnnnnnnnnnnnnnnnnnnnnnnnnnnnnnnnnnnnnnnnnnnnnnnnnnnnnnnnnnnnnnnnnnnnnnnnnnnnnnnnnnnnnnnnnnnnnnnnnnnnnnnnnnnnnnnnnnnnnnnnnnnnnnnnnnnnnnnnnnnnnnnnnnnnnnnnnnnnnnnnnnnnnnnnnnnnnnnnnnnnnnnnnnnnnnnnnnnnnnnnnnnnnnnnnnnnnnnnnnnnnnnnnnnnnnnnnnnnnnnnnnnnnnnnnnnnnnnnnnnnnnnnnnnnnnnnnnnnnnnnnnnnnnnnnnnnnnnnnnnnnnnnnnnnnnnnnnnnnnnnnnnnnnnnnnnnnnnnnnnnnnnnnnnnnnnnnnnnnnnnnnnnnnnnnnnnnnnnnnnnnnnnnnnnnnnnnnnnnnnnnnnnnnnnnnnnnnnnnnnnnnnnnnnnnnnnnnnnnnnnnnnnnnnnnnnnnnnnnnnnnnnnnnnnnnnnnnnnnnnnnnnnnnnnnnnnnnnnnnnnnnnnnnnnnnnnnnnnnnnnnnnnnnnnnnnnnnnnnnnnnnnnnnnnnnnnnnnnnnnnnnnnnnnnnnnnnnnnnnnnnnnnnnnnnnnnnnnnnnnnnnnnnnnnnnnnnnnnnnnnnnnnnnnnnnnnnnnnnnnnnnnnnnnnnnnnnnnnnnnnnnnnnnnnnnnnnnnnnnnnnnnnnnnnnnnnnnnnnnnnnnnnnnnnnnnnnnnnnnnnnnnnnnnnnnnnnnnnnnnnnnnnnnnnnnnnnnnnnnnnnnnnnnnnnnnnnnnnnnnnnnnnnnnnnnnnnnnnnnnnnnnnnnnnnnnnnnnnnnnnnnnnnnnnnnnnnnnnnnnnnnnnnnnnnnnnnnnnnnnnnnnnnnnnnnnnnnnnnnnnnnnnnnnnnnnnnnnnnnnnnnnnnnnnnnnnnnnnnnnnnnnnnnnnnnnnnnnnnnnnnnnnnnnnnnnnnnnnnnnnnnnnnnnnnnnnnnnnnnnnnnnnnnnnnnnnnnnnnnnnnnnnnnnnnnnnnnnnnnnnnnnnnnnnnnnnnnnnnnnnnnnnnnnnnnnnnnnnnnnnnnnnnnnnnnnnnnnnnnnnnnnnnnnnnnnnnnnnnnnnnnnnnnnnnnnnnnnnnnnnnnnnnnnnnnnnnnnnnnnnnnnnnnnnnnnnnnnnnnnnnnnnnnnnnnnnnnnnnnnnnnnnnnnnnnnnnnnnnnnnnnnnnnnnnnnnnnnnnnnnnnnnnnnnnnnnnnnnnnnnnnnnnnnnnnnnnnnnnnnnnnnnnnnnnnnnnnnnnnnnnnnnnnnnnnnnnnnnnnnnnnnnnnnnnnnnnnnnnnnnnnnnnnnnnnnnnnnnnnnnnnnnnnnnnnnnnnnnnnnnnnnnnnnnnnnnnnnnnnnnnnnnnnnnnnnnnnnnnnnnnnnnnnnnnnnnnnnnnnnnnnnnnnnnnnnnnnnnnnnnnnnnnnnnnnnnnnnnnnnnnnnnnnnnnnnnnnnnnnnnnnnnnnnnnnnnnnnnnnnnnnnnnnnnnnnnnnnnnnnnnnnnnnnnnnnnnnnnnnnnnnnnnnnnnnnnnnnnnnnnnnnnnnnnnnnnnnnnnnnnnnnnnnnnnnnnnnnnnnnnnnnnnnnnnnnnnnnnnnnnnnnnnnnnnnnnnnnnnnnnnnnnnnnnnnnnnnnnnnnnnnnnnnnnnnnnnnnnnnnnnnnnnnnnnnnnnnnnnnnnnnnnnnnnnnnnnnnnnnnnnnnnnnnnnnnnnnnnnnnnnnnnnnnnnnnnnnnnnnnnnnnnnnnnnnnnnnnnnnnnnnnnnnnnnnnnnnnnnnnnnnnnnnnnnnnnnnnnnnnnnnnnnnnnnnnnnnnnnnnnnnnnnnnnnnnnnnnnnnnnnnnnnnnnnnnnnnnnnnnnnnnnnnnnnnnnnnnnnnnnnnnnnnnnnnnnnnnnnnnnnnnnnnnnnnnnnnnnnnnnnnnnnnnnnnnnnnnnnnnnnnnnnnnnnnnnnnnnnnnnnnnnnnnnnnnnnnnnnnnnnnnnnnnnnnnnnnnnnnnnnnnnnnnnnnnnnnnnnnnnnnnnnnnnnnnnnnnnnnnnnnnnnnnnnnnnnnnnnnnnnnnnnnnnnnnnnnnnnnnnnnnnnnnnnnnnnnnnnnnnnnnnnnnnnnnnnnnnnnnnnnnnnnnnnnnnnnnnnnnnnnnnnnnnnnnnnnnnnnnnnnnnnnnnnnnnnnnnnnnnnnnnnnnnnnnnnnnnnnnnnnnnnnnnnnnnnnnnnnnnnnnnnnnnnnnnnnnnnnnnnnnnnnnnnnnnnnnnnnnnnnnnnnnnnnnnnnnnnnnnnnnnnnnnnnnnnnnnnnnnnnnnnnnnnnnnnnnnnnnnnnnnnnnnnnnnnnnnnnnnnnnnnnnnnnnnnnnnnnnnnnnnnnnnnnnnnnnnnnnnnnnnnnnnnnnnnnnnnnnnnnnnnnnnnnnnnnnnnnnnnnnnnnnnnnnnnnnnnnnnnnnnnnnnnnnnnnnnnnnnnnnnnnnnnnnnnnnnnnnnnnnnnnnnnnnnnnnnnnnnnnnnnnnnnnnnnnnnnnnnnnnnnnnnnnnnnnnnnnnnnnnnnnnnnnnnnnnnnnnnnnnnnnnnnnnnnnnnnnnnnnnnnnnnnnnnnnnnnnnnnnnnnnnnnnnnnnnnnnnnnnnnnnnnnnnnnnnnnnnnnnnnnnnnnnnnnnnnnnnnnnnnnnnnnnnnnnnnnnnnnnnnnnnnnnnnnnnnnnnnnnnnnnnnnnnnnnnnnnnnnnnnnnnnnnnnnnnnnnnnnnnnnnnnnnnnnnnnnnnnnnnnnnnnnnnnnnnnnnnnnnnnnnnnnnnnnnnnnnnnnnnnnnnnnnnnnnnnnnnnnnnnnnnnnnnnnnnnnnnnnnnnnnnnnnnnnnnnnnnnnnnnnnnnnnnnnnnnnnnnnnnnnnnnnnnnnnnnnnnnnnnnnnnnnnnnnnnnnnnnnnnnnnnnnnnnnnnnnnnnnnnnnnnnnnnnnnnnnnnnnnnnnnnnnnnnnnnnnnnnnnnnnnnnnnnnnnnnnnnnnnnnnnnnnnnnnnnnnnnnnnnnnnnnnnnnnnnnnnnnnnnnnnnnnnnnnnnnnnnnnnnnnnnnnnnnnnnnnnnnnnnnnnnnnnnnnnnnnnnnnnnnnnnnnnnnnnnnnnnnnnnnnnnnnnnnnnnnnnnnnnnnnnnnnnnnnnnnnnnnnnnnnnnnnnnnnnnnnnnnnnnnnnnnnnnnnnnnnnnnnnnnnnnnnnnnnnnnnnnnnnnnnnnnnnnnnnnnnnnnnnnnnnnnnnnnnnnnnnnnnnnnnnnnnnnnnnnnnnnnnnnnnnnnnnnnnnnnnnnnnnnnnnnnnnnnnnnnnnnnnnnnnnnnnnnnnnnnnnnnnnnnnnnnnnnnnnnnnnnnnnnnnnnnnnnnnnnnnnnnnnnnnnnnnnnnnnnnnnnnnnnnnnnnnnnnnnnnnnnnnnnnnnnnnnnnnnnnnnnnnnnnnnnnnnnnnnnnnnnnnnnnnnnnnnnnnnnnnnnnnnnnnnnnnnnnnnnnnnnnnnnnnnnnnnnnnnnnnnnnnnnnnnnnnnnnnnnnnnnnnnnnnnnnnnnnnnnnnnnnnnnnnnnnnnnnnnnnnnnnnnnnnnnnnnnnnnnnnnnnnnnnnnnnnnnnnnnnnnnnnnnnnnnnnnnnnnnnnnnnnnnnnnnnnnnnnnnnnnnnnnnnnnnnnnnnnnnnnnnnnnnnnnnnnnnnnnnnnnnnnnnnnnnnnnnnnnnnnnnnnnnnnnnnnnnnnnnnnnnnnnnnnnnnnnnnnnnnnnnnnnnnnnnnnnnnnnnnnnnnnnnnnnnnnnnnnnnnnnnnnnnnnnnnnnnnnnnnnnnnnnnnnnnnnnnnnnnnnnnnnnnnnnnnnnnnnnnnnnnnnnnnnnnnnnnnnnnnnnnnnnnnnnnnnnnnnnnnnnnnnnnnnnnnnnnnnnnnnnnnnnnnnnnnnnnnnnnnnnnnnnnnnnnnnnnnnnnnnnnnnnnnnnnnnnnnnnnnnnnnnnnnnnnnnnnnnnnnnnnnnnnnnnnnnnnnnnnnnnnnnnnnnnnnnnnnnnnnnnnnnnnnnnnnnnnnnnnnnnnnnnnnnnnnnnnnnnnnnnnnnnnnnnnnnnnnnnnnnnnnnnnnnnnnnnnnnnnnnnnnnnnnnnnnnnnnnnnnnnnnnnnnnnnnnnnnnnnnnnnnnnnnnnnnnnnnnnnnnnnnnnnnnnnnnnnnnnnnnnnnnnnnnnnnnnnnnnnnnnnnnnnnnnnnnnnnnnnnnnnnnnnnnnnnnnnnnnnnnnnnnnnnnnnnnnnnnnnnnnnnnnnnnnnnnnnnnnnnnnnnnnnnnnnnnnnnnnnnnnnnnnnnnnnnnnnnnnnnnnnnnnnnnnnnnnnnnnnnnnnnnnnnnnnnnnnnnnnnnnnnnnnnnnnnnnnnnnnnnnnnnnnnnnnnnnnnnnnnnnnnnnnnnnnnnnnnnnnnnnnnnnnnnnnnnnnnnnnnnnnnnnnnnnnnnnnnnnnnnnnnnnnnnnnnnnnnnnnnnnnnnnnnnnnnnnnnnnnnnnnnnnnnnnnnnnnnnnnnnnnnnnnnnnnnnnnnnnnnnnnnnnnnnnnnnnnnnnnnnnnnnnnnnnnnnnnnnnnnnnnnnnnnnnnnnnnnnnnnnnnnnnnnnnnnnnnnnnnnnnnnnnnnnnnnnnnnnnnnnnnnnnnnnnnnnnnnnnnnnnnnnnnnnnnnnnnnnnnnnnnnnnnnnnnnnnnnnnnnnnnnnnnnnnnnnnnnnnnnnnnnnnnnnnnnnnnnnnnnnnnnnnnnnnnnnnnnnnnnnnnnnnnnnnnnnnnnnnnnnnnnnnnnnnnnnnnnnnnnnnnnnnnnnnnnnnnnnnnnnnnnnnnnnnnnnnnnnnnnnnnnnnnnnnnnnnnnnnnnnnnnnnnnnnnnnnnnnnnnnnnnnnnnnnnnnnnnnnnnnnnnnnnnnnnnnnnnnnnnnnnnnnnnnnnnnnnnnnnnnnnnnnnnnnnnnnnnnnnnnnnnnnnnnnnnnnnnnnnnnnnnnnnnnnnnnnnnnnnnnnnnnnnnnnnnnnnnnnnnnnnnnnnnnnnnnnnnnnnnnnnnnnnnnnnnnnnnnnnnnnnnnnnnnnnnnnnnnnnnnnnnnnnnnnnnnnnnnnnnnnnnnnnnnnnnnnnnnnnnnnnnnnnnnnnnnnnnnnnnnnnnnnnnnnnnnnnnnnnnnnnnnnnnnnnnnnnnnnnnnnnnnnnnnnnnnnnnnnnnnnnnnnnnnnnnnnnnnnnnnnnnnnnnnnnnnnnnnnnnnnnnnnnnnnnnnnnnnnnnnnnnnnnnnnnnnnnnnnnnnnnnnnnnnnnnnnnnnnnnnnnnnnnnnnnnnnnnnnnnnnnnnnnnnnnnnnnnnnnnnnnnnnnnnnnnnnnnnnnnnnnnnnnnnnnnnnnnnnnnnnnnnnnnnnnnnnnnnnnnnnnnnnnnnnnnnnnnnnnnnnnnnnnnnnnnnnnnnnnnnnnnnnnnnnnnnnnnnnnnnnnnnnnnnnnnnnnnnnnnnnnnnnnnnnnnnnnnnnnnnnnnnnnnnnnnnnnnnnnnnnnnnnnnnnnnnnnnnnnnnnnnnnnnnnnnnnnnnnnnnnnnnnnnnnnnnnnnnnnnnnnnnnnnnnnnnnnnnnnnnnnnnnnnnnnnnnnnnnnnnnnnnnnnnnnnnnnnnnnnnnnnnnnnnnnnnnnnnnnnnnnnnnnnnnnnnnnnnnnnnnnnnnnnnnnnnnnnnnnnnnnnnnnnnnnnnnnnnnnnnnnnnnnnnnnnnnnnnnnnnnnnnnnnnnnnnnnnnnnnnnnnnnnnnnnnnnnnnnnnnnnnnnnnnnnnnnnnnnnnnnnnnnnnnnnnnnnnnnnnnnnnnnnnnnnnnnnnnnnnnnnnnnnnnnnnnnnnnnnnnnnnnnnnnnnnnnnnnnnnnnnnnnnnnnnnnnnnnnnnnnnnnnnnnnnnnnnnnnnnnnnnnnnnnnnnnnnnnnnnnnnnnnnnnnnnnnnnnnnnnnnnnnnnnnnnnnnnnnnnnnnnnnnnnnnnnnnnnnnnnnnnnnnnnnnnnnnnnnnnnnnnnnnnnnnnnnnnnnnnnnnnnnnnnnnnnnnnnnnnnnnnnnnnnnnnnnnnnnnnnnnnnnnnnnnnnnnnnnnnnnnnnnnnnnnnnnnnnnnnnnnnnnnnnnnnnnnnnnnnnnnnnnnnnnnnnnnnnnnnnnnnnnnnnnnnnnnnnnnnnnnnnnnnnnnnnnnnnnnnnnnnnnnnnnnnnnnnnnnnnnnnnnnnnnnnnnnnnnnnnnnnnnnnnnnnnnnnnnnnnnnnnnnnnnnnnnnnnnnnnnnnnnnnnnnnnnnnnnnnnnnnnnnnnnnnnnnnnnnnnnnnnnnnnnnnnnnnnnnnnnnnnnnnnnnnnnnnnnnnnnnnnnnnnnnnnnnnnnnnnnnnnnnnnnnnnnnnnnnnnnnnnnnnnnnnnnnnnnnnnnnnnnnnnnnnnnnnnnnnnnnnnnnnnnnnnnnnnnnnnnnnnnnnnnnnnnnnnnnnnnnnnnnnnnnnnnnnnnnnnnnnnnnnnnnnnnnnnnnnnnnnnnnnnnnnnnnnnnnnnnnnnnnnnnnnnnnnnnnnnnnnnnnnnnnnnnnnnnnnnnnnnnnnnnnnnnnnnnnnnnnnnnnnnnnnnnnnnnnnnnnnnnnnnnnnnnnnnnnnnnnnnnnnnnnnnnnnnnnnnnnnnnnnnnnnnnnnnnnnnnnnnnnnnnnnnnnnnnnnnnnnnnnnnnnnnnnnnnnnnnnnnnnnnnnnnnnnnnnnnnnnnnnnnnnnnnnnnnnnnnnnnnnnnnnnnnnnnnnnnnnnnnnnnnnnnnnnnnnnnnnnnnnnnnnnnnnnnnnnnnnnnnnnnnnnnnnnnnnnnnnnnnnnnnnnnnnnnnnnnnnnnnnnnnnnnnnnnnnnnnnnnnnnnnnnnnnnnnnnnnnnnnnnnnnnnnnnnnnnnnnnnnnnnnnnnnnnnnnnnnnnnnnnnnnnnnnnnnnnnnnnnnnnnnnnnnnnnnnnnnnnnnnnnnnnnnnnnnnnnnnnnnnnnnnnnnnnnnnnnnnnnnnnnnnnnnnnnnnnnnnnnnnnnnnnnnnnnnnnnnnnnnnnnnnnnnnnnnnnnnnnnnnnnnnnnnnnnnnnnnnnnnnnnnnnnnnnnnnnnnnnnnnnnnnnnnnnnnnnnnnnnnnnnnnnnnnnnnnnnnnnnnnnnnnnnnnnnnnnnnnnnnnnnnnnnnnnnnnnnnnnnnnnnnnnnnnnnnnnnnnnnnnnnnnnnnnnnnnnnnnnnnnnnnnnnnnnnnnnnnnnnnnnnnnnnnnnnnnnnnnnnnnnnnnnnnnnnnnnnnnnnnnnnnnnnnnnnnnnnnnnnnnnnnnnnnnnnnnnnnnnnnnnnnnnnnnnnnnnnnnnnnnnnnnnnnnnnnnnnnnnnnnnnnnnnnnnnnnnnnnnnnnnnnnnnnnnnnnnnnnnnnnnnnnnnnnnnnnnnnnnnnnnnnnnnnnnnnnnnnnnnnnnnnnnnnnnnnnnnnnnnnnnnnnnnnnnnnnnnnnnnnnnnnnnnnnnnnnnnnnnnnnnnnnnnnnnnnnnnnnnnnnnnnnnnnnnnnnnnnnnnnnnnnnnnnnnnnnnnnnnnnnnnnnnnnnnnnnnnnnnnnnnnnnnnnnnnnnnnnnnnnnnnnnnnnnnnnnnnnnnnnnnnnnnnnnnnnnnnnnnnnnnnnnnnnnnnnnnnnnnnnnnnnnnnnnnnnnnnnnnnnnnnnnnnnnnnnnnnnnnnnnnnnnnnnnnnnnnnnnnnnnnnnnnnnnnnnnnnnnnnnnnnnnnnnnnnnnnnnnnnnnnnnnnnnnnnnnnnnnnnnnnnnnnnnnnnnnnnnnnnnnnnnnnnnnnnnnnnnnnnnnnnnnnnnnnnnnnnnnnnnnnnnnnnnnnnnnnnnnnnnnnnnnnnnnnnnnnnnnnnnnnnnnnnnnnnnnnnnnnnnnnnnnnnnnnnnnnnnnnnnnnnnnnnnnnnnnnnnnnnnnnnnnnnnnnnnnnnnnnnnnnnnnnnnnnnnnnnnnnnnnnnnnnnnnnnnnnnnnnnnnnnnnnnnnnnnnnnnnnnnnnnnnnnnnnnnnnnnnnnnnnnnnnnnnnnnnnnnnnnnnnnnnnnnnnnnnnnnnnnnnnnnnnnnnnnnnnnnnnnnnnnnnnnnnnnnnnnnnnnnnnnnnnnnnnnnnnnnnnnnnnnnnnnnnnnnnnnnnnnnnnnnnnnnnnnnnnnnnnnnnnnnnnnnnnnnnnnnnnnnnnnnnnnnnnnnnnnnnnnnnnnnnnnnnnnnnnnnnnnnnnnnnnnnnnnnnnnnnnnnnnnnnnnnnnnnnnnnnnnnnnnnnnnnnnnnnnnnnnnnnnnnnnnnnnnnnnnnnnnnnnnnnnnnnnnnnnnnnnnnnnnnnnnnnnnnnnnnnnnnnnnnnnnnnnnnnnnnnnnnnnnnnnnnnnnnnnnnnnnnnnnnnnnnnnnnnnnnnnnnnnnnnnnnnnnnnnnnnnnnnnnnnnnnnnnnnnnnnnnnnnnnnnnnnnnnnnnnnnnnnnnnnnnnnnnnnnnnnnnnnnnnnnnnnnnnnnnnnnnnnnnnnnnnnnnnnnnnnnnnnnnnnnnnnnnnnnnnnnnnnnnnnnnnnnnnnnnnnnnnnnnnnnnnnnnnnnnnnnnnnnnnnnnnnnnnnnnnnnnnnnnnnnnnnnnnnnnnnnnnnnnnnnnnnnnnnnnnnnnnnnnnnnnnnnnnnnnnnnnnnnnnnnnnnnnnnnnnnnnnnnnnnnnnnnnnnnnnnnnnnnnnnnnnnnnnnnnnnnnnnnnnnnnnnnnnnnnnnnnnnnnnnnnnnnnnnnnnnnnnnnnnnnnnnnnnnnnnnnnnnnnnnnnnnnnnnnnnnnnnnnnnnnnnnnnnnnnnnnnnnnnnnnnnnnnnnnnnnnnnnnnnnnnnnnnnnnnnnnnnnnnnnnnnnnnnnnnnnnnnnnnnnnnnnnnnnnnnnnnnnnnnnnnnnnnnnnnnnnnnnnnnnnnnnnnnnnnnnnnnnnnnnnnnnnnnnnnnnnnnnnnnnnnnnnnnnnnnnnnnnnnnnnnnnnnnnnnnnnnnnnnnnnnnnnnnnnnnnnnnnnnnnnnnnnnnnnnnnnnnnnnnnnnnnnnnnnnnnnnnnnnnnnnnnnnnnnnnnnnnnnnnnnnnnnnnnnnnnnnnnnnnnnnnnnnnnnnnnnnnnnnnnnnnnnnnnnnnnnnnnnnnnnnnnnnnnnnnnnnnnnnnnnnnnnnnnnnnnnnnnnnnnnnnnnnnnnnnnnnnnnnnnnnnnnnnnnnnnnnnnnnnnnnnnnnnnnnnnnnnnnnnnnnnnnnnnnnnnnnnnnnnnnnnnnnnnnnnnnnnnnnnnnnnnnnnnnnnnnnnnnnnnnnnnnnnnnnnnnnnnnnnnnnnnnnnnnnnnnnnnnnnnnnnnnnnnnnnnnnnnnnnnnnnnnnnnnnnnnnnnnnnnnnnnnnnnnnnnnnnnnnnnnnnnnnnnnnnnnnnnnnnnnnnnnnnnnnnnnnnnnnnnnnnnnnnnnnnnnnnnnnnnnnnnnnnnnnnnnnnnnnnnnnnnnnnnnnnnnnnnnnnnnnnnnnnnnnnnnnnnnnnnnnnnnnnnnnnnnnnnnnnnnnnnnnnnnnnnnnnnnnnnnnnnnnnnnnnnnnnnnnnnnnnnnnnnnnnnnnnnnnnnnnnnnnnnnnnnnnnnnnnnnnnnnnnnnnnnnnnnnnnnnnnnnnnnnnnnnnnnnnnnnnnnnnnnnnnnnnnnnnnnnnnnnnnnnnnnnnnnnnnnnnnnnnnnnnnnnnnnnnnnnnnnnnnnnnnnnnnnnnnnnnnnnnnnnnnnnnnnnnnnnnnnnnnnnnnnnnnnnnnnnnnnnnnnnnnnnnnnnnnnnnnnnnnnnnnnnnnnnnnnnnnnnnnnnnnnnnnnnnnnnnnnnnnnnnnnnnnnnnnnnnnnnnnnnnnnnnnnnnnnnnnnnnnnnnnnnnnnnnnnnnnnnnnnnnnnnnnnnnnnnnnnnnnnnnnnnnnnnnnnnnnnnnnnnnnnnnnnnnnnnnnnnnnnnnnnnnnnnnnnnnnnnnnnnnnnnnnnnnnnnnnnnnnnnnnnnnnnnnnnnnnnnnnnnnnnnnnnnnnnnnnnnnnnnnnnnnnnnnnnnnnnnnnnnnnnnnnnnnnnnnnnnnnnnnnnnnnnnnnnnnnnnnnnnnnnnnnnnnnnnnnnnnnnnnnnnnnnnnnnnnnnnnnnnnnnnnnnnnnnnnnnnnnnnnnnnnnnnnnnnnnnnnnnnnnnnnnnnnnnnnnnnnnnnnnnnnnnnnnnnnnnnnnnnnnnnnnnnnnnnnnnnnnnnnnnnnnnnnnnnnnnnnnnnnnnnnnnnnnnnnnnnnnnnnnnnnnnnnnnnnnnnnnnnnnnnnnnnnnnnnnnnnnnnnnnnnnnnnnnnnnnnnnnnnnnnnnnnnnnnnnnnnnnnnnnnnnnnnnnnnnnnnnnnnnnnnnnnnnnnnnnnnnnnnnnnnnnnnnnnnnnnnnnnnnnnnnnnnnnnnnnnnnnnnnnnnnnnnnnnnnnnnnnnnnnnnnnnnnnnnnnnnnnnnnnnnnnnnnnnnnnnnnnnnnnnnnnnnnnnnnnnnnnnnnnnnnnnnnnnnnnnnnnnnnnnnnnnnnnnnnnnnnnnnnnnnnnnnnnnnnnnnnnnnnnnnnnnnnnnnnnnnnnnnnnnnnnnnnnnnnnnnnnnnnnnnnnnnnnnnnnnnnnnnnnnnnnnnnnnnnnnnnnnnnnnnnnnnnnnnnnnnnnnnnnnnnnnnnnnnnnnnnnnnnnnnnnnnnnnnnnnnnnnnnnnnnnnnnnnnnnnnnnnnnnnnnnnnnnnnnnnnnnnnnnnnnnnnnnnnnnnnnnnnnnnnnnnnnnnnnnnnnnnnnnnnnnnnnnnnnnnnnnnnnnnnnnnnnnnnnnnnnnnnnnnnnnnnnnnnnnnnnnnnnnnnnnnnnnnnnnnnnnnnnnnnnnnnnnnnnnnnnnnnnnnnnnnnnnnnnnnnnnnnnnnnnnnnnnnnnnnnnnnnnnnnnnnnnnnnnnnnnnnnnnnnnnnnnnnnnnnnnnnnnnnnnnnnnnnnnnnnnnnnnnnnnnnnnnnnnnnnnnnnnnnnnnnnnnnnnnnnnnnnnnnnnnnnnnnnnnnnnnnnnnnnnnnnnnnnnnnnnnnnnnnnnnnnnnnnnnnnnnnnnnnnnnnnnnnnnnnnnnnnnnnnnnnnnnnnnnnnnnnnnnnnnnnnnnnnnnnnnnnnnnnnnnnnnnnnnnnnnnnnnnnnnnnnnnnnnnnnnnnnnnnnnnnnnnnnnnnnnnnnnnnnnnnnnnnnnnnnnnnnnnnnnnnnnnnnnnnnnnnnnnnnnnnnnnnnnnnnnnnnnnnnnnnnnnnnnnnnnnnnnnnnnnnnnnnnnnnnnnnnnnnnnnnnnnnnnnnnnnnnnnnnnnnnnnnnnnnnnnnnnnnnnnnnnnnnnnnnnnnnnnnnnnnnnnnnnnnnnnnnnnnnnnnnnnnnnnnnnnnnnnnnnnnnnnnnnnnnnnnnnnnnnnnnnnnnnnnnnnnnnnnnnnnnnnnnnnnnnnnnnnnnnnnnnnnnnnnnnnnnnnnnnnnnnnnnnnnnnnnnnnnnnnnnnnnnnnnnnnnnnnnnnnnnnnnnnnnnnnnnnnnnnnnnnnnnnnnnnnnnnnnnnnnnnnnnnnnnnnnnnnnnnnnnnnnnnnnnnnnnnnnnnnnnnnnnnnnnnnnnnnnnnnnnnnnnnnnnnnnnnnnnnnnnnnnnnnnnnnnnnnnnnnnnnnnnnnnnnnnnnnnnnnnnnnnnnnnnnnnnnnnnnnnnnnnnnnnnnnnnnnnnnnnnnnnnnnnnnnnnnnnnnnnnnnnnnnnnnnnnnnnnnnnnnnnnnnnnnnnnnnnnnnnnnnnnnnnnnnnnnnnnnnnnnnnnnnnnnnnnnnnnnnnnnnnnnnnnnnnnnnnnnnnnnnnnnnnnnnnnnnnnnnnnnnnnnnnnnnnnnnnnnnnnnnnnnnnnnnnnnnnnnnnnnnnnnnnnnnnnnnnnnnnnnnnnnnnnnnnnnnnnnnnnnnnnnnnnnnnnnnnnnnnnnnnnnnnnnnnnnnnnnnnnnnnnnnnnnnnnnnnnnnnnnnnnnnnnnnnnnnnnnnnnnnnnnnnnnnnnnnnnnnnnnnnnnnnnnnnnnnnnnnnnnnnnnnnnnnnnnnnnnnnnnnnnnnnnnnnnnnnnnnnnnnnnnnnnnnnnnnnnnnnnnnnnnnnnnnnnnnnnnnnnnnnnnnnnnnnnnnnnnnnnnnnnnnnnnnnnnnnnnnnnnnnnnnnnnnnnnnnnnnnnnnnnnnnnnnnnnnnnnnnnnnnnnnnnnnnnnnnnnnnnnnnnnnnnnnnnnnnnnnnnnnnnnnnnnnnnnnnnnnnnnnnnnnnnnnnnnnnnnnnnnnnnnnnnnnnnnnnnnnnnnnnnnnnnnnnnnnnnnnnnnnnnnnnnnnnnnnnnnnnnnnnnnnnnnnnnnnnnnnnnnnnnnnnnnnnnnnnnnnnnnnnnnnnnnnnnnnnnnnnnnnnnnnnnnnnnnnnnnnnnnnnnnnnnnnnnnnnnnnnnnnnnnnnnnnnnnnnnnnnnnnnnnnnnnnnnnnnnnnnnnnnnnnnnnnnnnnnnnnnnnnnnnnnnnnnnnnnnnnnnnnnnnnnnnnnnnnnnnnnnnnnnnnnnnnnnnnnnnnnnnnnnnnnnnnnnnnnnnnnnnnnnnnnnnnnnnnnnnnnnnnnnnnnnnnnnnnnnnnnnnnnnnnnnnnnnnnnnnnnnnnnnnnnnnnnnnnnnnnnnnnnnnnnnnnnnnnnnnnnnnnnnnnnnnnnnnnnnnnnnnnnnnnnnnnnnnnnnnnnnnnnnnnnnnnnnnnnnnnnnnnnnnnnnnnnnnnnnnnnnnnnnnnnnnnnnnnnnnnnnnnnnnnnnnnnnnnnnnnnnnnnnnnnnnnnnnnnnnnnnnnnnnnnnnnnnnnnnnnnnnnnnnnnnnnnnnnnnnnnnnnnnnnnnnnnnnnnnnnnnnnnnnnnnnnnnnnnnnnnnnnnnnnnnnnnnnnnnnnnnnnnnnnnnnnnnnnnnnnnnnnnnnnnnnnnnnnnnnnnnnnnnnnnnnnnnnnnnnnnnnnnnnnnnnnnnnnnnnnnnnnnnnnnnnnnnnnnnnnnnnnnnnnnnnnnnnnnnnnnnnnnnnnnnnnnnnnnnnnnnnnnnnnnnnnnnnnnnnnnnnnnnnnnnnnnnnnnnnnnnnnnnnnnnnnnnnnnnnnnnnnnnnnnnnnnnnnnnnnnnnnnnnnnnnnnnnnnnnnnnnnnnnnnnnnnnnnnnnnnnnnnnnnnnnnnnnnnnnnnnnnnnnnnnnnnnnnnnnnnnnnnnnnnnnnnnnnnnnnnnnnnnnnnnnnnnnnnnnnnnnnnnnnnnnnnnnnnnnnnnnnnnnnnnnnnnnnnnnnnnnnnnnnnnnnnnnnnnnnnnnnnnnnnnnnnnnnnnnnnnnnnnnnnnnnnnnnnnnnnnnnnnnnnnnnnnnnnnnnnnnnnnnnnnnnnnnnnnnnnnnnnnnnnnnnnnnnnnnnnnnnnnnnnnnnnnnnnnnnnnnnnnnnnnnnnnnnnnnnnnnnnnnnnnnnnnnnnnnnnnnnnnnnnnnnnnnnnnnnnnnnnnnnnnnnnnnnnnnnnnnnnnnnnnnnnnnnnnnnnnnnnnnnnnnnnnnnnnnnnnnnnnnnnnnnnnnnnnnnnnnnnnnnnnnnnnnnnnnnnnnnnnnnnnnnnnnnnnnnnnnnnnnnnnnnnnnnnnnnnnnnnnnnnnnnnnnnnnnnnnnnnnnnnnnnnnnnnnnnnnnnnnnnnnnnnnnnnnnnnnnnnnnnnnnnnnnnnnnnnnnnnnnnnnnnnnnnnnnnnnnnnnnnnnnnnnnnnnnnnnnnnnnnnnnnnnnnnnnnnnnnnnnnnnnnnnnnnnnnnnnnnnnnnnnnnnnnnnnnnnnnnnnnnnnnnnnnnnnnnnnnnnnnnnnnnnnnnnnnnnnnnnnnnnnnnnnnnnnnnnnnnnnnnnnnnnnnnnnnnnnnnnnnnnnnnnnnnnnnnnnnnnnnnnnnnnnnnnnnnnnnnnnnnnnnnnnnnnnnnnnnnnnnnnnnnnnnnnnnnnnnnnnnnnnnnnnnnnnnnnnnnnnnnnnnnnnnnnnnnnnnnnnnnnnnnnnnnnnnnnnnnnnnnnnnnnnnnnnnnnnnnnnnnnnnnnnnnnnnnnnnnnnnnnnnnnnnnnnnnnnnnnnnnnnnnnnnnnnnnnnnnnnnnnnnnnnnnnnnnnnnnnnnnnnnnnnnnnnnnnnnnnnnnnnnnnnnnnnnnnnnnnnnnnnnnnnnnnnnnnnnnnnnnnnnnnnnnnnnnnnnnnnnnnnnnnnnnnnnnnnnnnnnnnnnnnnnnnnnnnnnnnnnnnnnnnnnnnnnnnnnnnnnnnnnnnnnnnnnnnnnnnnnnnnnnnnnnnnnnnnnnnnnnnnnnnnnnnnnnnnnnnnnnnnnnnnnnnnnnnnnnnnnnnnnnnnnnnnnnnnnnnnnnnnnnnnnnnnnnnnnnnnnnnnnnnnnnnnnnnnnnnnnnnnnnnnnnnnnnnnnnnnnnnnnnnnnnnnnnnnnnnnnnnnnnnnnnnnnnnnnnnnnnnnnnnnnnnnnnnnnnnnnnnnnnnnnnnnnnnnnnnnnnnnnnnnnnnnnnnnnnnnnnnnnnnnnnnnnnnnnnnnnnnnnnnnnnnnnnnnnnnnnnnnnnnnnnnnnnnnnnnnnnnnnnnnnnnnnnnnnnnnnnnnnnnnnnnnnnnnnnnnnnnnnnnnnnnnnnnnnnnnnnnnnnnnnnnnnnnnnnnnnnnnnnnnnnnnnnnnnnnnnnnnnnnnnnnnnnnnnnnnnnnnnnnnnnnnnnnnnnnnnnnnnnnnnnnnnnnnnnnnnnnnnnnnnnnnnnnnnnnnnnnnnnnnnnnnnnnnnnnnnnnnnnnnnnnnnnnnnnnnnnnnnnnnnnnnnnnnnnnnnnnnnnnnnnnnnnnnnnnnnnnnnnnnnnnnnnnnnnnnnnnnnnnnnnnnnnnnnnnnnnnnnnnnnnnnnnnnnnnnnnnnnnnnnnnnnnnnnnnnnnnnnnnnnnnnnnnnnnnnnnnnnnnnnnnnnnnnnnnnnnnnnnnnnnnnnnnnnnnnnnnnnnnnnnnnnnnnnnnnnnnnnnnnnnnnnnnnnnnnnnnnnnnnnnnnnnnnnnnnnnnnnnnnnnnnnnnnnnnnnnnnnnnnnnnnnnnnnnnnnnnnnnnnnnnnnnnnnnnnnnnnnnnnnnnnnnnnnnnnnnnnnnnnnnnnnnnnnnnnnnnnnnnnnnnnnnnnnnnnnnnnnnnnnnnnnnnnnnnnnnnnnnnnnnnnnnnnnnnnnnnnnnnnnnnnnnnnnnnnnnnnnnnnnnnnnnnnnnnnnnnnnnnnnnnnnnnnnnnnnnnnnnnnnnnnnnnnnnnnnnnnnnnnnnnnnnnnnnnnnnnnnnnnnnnnnnnnnnnnnnnnnnnnnnnnnnnnnnnnnnnnnnnnnnnnnnnnnnnnnnnnnnnnnnnnnnnnnnnnnnnnnnnnnnnnnnnnnnnnnnnnnnnnnnnnnnnnnnnnnnnnnnnnnnnnnnnnnnnnnnnnnnnnnnnnnnnnnnnnnnnnnnnnnnnnnnnnnnnnnnnnnnnnnnnnnnnnnnnnnnnnnnnnnnnnnnnnnnnnnnnnnnnnnnnnnnnnnnnnnnnnnnnnnnnnnnnnnnnnnnnnnnnnnnnnnnnnnnnnnnnnnnnnnnnnnnnnnnnnnnnnnnnnnnnnnnnnnnnnnnnnnnnnnnnnnnnnnnnnnnnnnnnnnnnnnnnnnnnnnnnnnnnnnnnnnnnnnnnnnnnnnnnnnnnnnnnnnnnnnnnnnnnnnnnnnnnnnnnnnnnnnnnnnnnnnnnnnnnnnnnnnnnnnnnnnnnnnnnnnnnnnnnnnnnnnnnnnnnnnnnnnnnnnnnnnnnnnnnnnnnnnnnnnnnnnnnnnnnnnnnnnnnnnnnnnnnnnnnnnnnnnnnnnnnnnnnnnnnnnnnnnnnnnnnnnnnnnnnnnnnnnnnnnnnnnnnnnnnnnnnnnnnnnnnnnnnnnnnnnnnnnnnnnnnnnnnnnnnnnnnnnnnnnnnnnnnnnnnnnnnnnnnnnnnnnnnnnnnnnnnnnnnnnnnnnnnnnnnnnnnnnnnnnnnnnnnnnnnnnnnnnnnnnnnnnnnnnnnnnnnnnnnnnnnnnnnnnnnnnnnnnnnnnnnnnnnnnnnnnnnnnnnnnnnnnnnnnnnnnnnnnnnnnnnnnnnnnnnnnnnnnnnnnnnnnnnnnnnnnnnnnnnnnnnnnnnnnnnnnnnnnnnnnnnnnnnnnnnnnnnnnnnnnnnnnnnnnnnnnnnnnnnnnnnnnnnnnnnnnnnnnnnnnnnnnnnnnnnnnnnnnnnnnnnnnnnnnnnnnnnnnnnnnnnnnnnnnnnnnnnnnnnnnnnnnnnnnnnnnnnnnnnnnnnnnnnnnnnnnnnnnnnnnnnnnnnnnnnnnnnnnnnnnnnnnnnnnnnnnnnnnnnnnnnnnnnnnnnnnnnnnnnnnnnnnnnnnnnnnnnnnnnnnnnnnnnnnnnnnnnnnnnnnnnnnnnnnnnnnnnnnnnnnnnnnnnnnnnnnnnnnnnnnnnnnnnnnnnnnnnnnnnnnnnnnnnnnnnnnnnnnnnnnnnnnnnnnnnnnnnnnnnnnnnnnnnnnnnnnnnnnnnnnnnnnnnnnnnnnnnnnnnnnnnnnnnnnnnnnnnnnnnnnnnnnnnnnnnnnnnnnnnnnnnnnnnnnnnnnnnnnnnnnnnnnnnnnnnnnnnnnnnnnnnnnnnnnnnnnnnnnnnnnnnnnnnnnnnnnnnnnnnnnnnnnnnnnnnnnnnnnnnnnnnnnnnnnnnnnnnnnnnnnnnnnnnnnnnnnnnnnnnnnnnnnnnnnnnnnnnnnnnnnnnnnnnnnnnnnnnnnnnnnnnnnnnnnnnnnnnnnnnnnnnnnnnnnnnnnnnnnnnnnnnnnnnnnnnnnnnnnnnnnnnnnnnnnnnnnnnnnnnnnnnnnnnnnnnnnnnnnnnnnnnnnnnnnnnnnnnnnnnnnnnnnnnnnnnnnnnnnnnnnnnnnnnnnnnnnnnnnnnnnnnnnnnnnnnnnnnnnnnnnnnnnnnnnnnnnnnnnnnnnnnnnnnnnnnnnnnnnnnnnnnnnnnnnnnnnnnnnnnnnnnnnnnnnnnnnnnnnnnnnnnnnnnnnnnnnnnnnnnnnnnnnnnnnnnnnnnnnnnnnnnnnnnnnnnnnnnnnnnnnnnnnnnnnnnnnnnnnnnnnnnnnnnnnnnnnnnnnnnnnnnnnnnnnnnnnnnnnnnnnnnnnnnnnnnnnnnnnnnnnnnnnnnnnnnnnnnnnnnnnnnnnnnnnnnnnnnnnnnnnnnnnnnnnnnnnnnnnnnnnnnnnnnnnnnnnnnnnnnnnnnnnnnnnnnnnnnnnnnnnnnnnnnnnnnnnnnnnnnnnnnnnnnnnnnnnnnnnnnnnnnnnnnnnnnnnnnnnnnnnnnnnnnnnnnnnnnnnnnnnnnnnnnnnnnnnnnnnnnnnnnnnnnnnnnnnnnnnnnnnnnnnnnnnnnnnnnnnnnnnnnnnnnnnnnnnnnnnnnnnnnnnnnnnnnnnnnnnnnnnnnnnnnnnnnnnnnnnnnnnnnnnnnnnnnnnnnnnnnnnnnnnnnnnnnnnnnnnnnnnnnnnnnnnnnnnnnnnnnnnnnnnnnnnnnnnnnnnnnnnnnnnnnnnnnnnnnnnnnnnnnnnnnnnnnnnnnnnnnnnnnnnnnnnnnnnnnnnnnnnnnnnnnnnnnnnnnnnnnnnnnnnnnnnnnnnnnnnnnnnnnnnnnnnnnnnnnnnnnnnnnnnnnnnnnnnnnnnnnnnnnnnnnnnnnnnnnnnnnnnnnnnnnnnnnnnnnnnnnnnnnnnnnnnnnnnnnnnnnnnnnnnnnnnnnnnnnnnnnnnnnnnnnnnnnnnnnnnnnnnnnnnnnnnnnnnnnnnnnnnnnnnnnnnnnnnnnnnnnnnnnnnnnnnnnnnnnnnnnnnnnnnnnnnnnnnnnnnnnnnnnnnnnnnnnnnnnnnnnnnnnnnnnnnnnnnnnnnnnnnnnnnnnnnnnnnnnnnnnnnnnnnnnnnnnnnnnnnnnnnnnnnnnnnnnnnnnnnnnnnnnnnnnnnnnnnnnnnnnnnnnnnnnnnnnnnnnnnnnnnnnnnnnnnnnnnnnnnnnnnnnnnnnnnnnnnnnnnnnnnnnnnnnnnnnnnnnnnnnnnnnnnnnnnnnnnnnnnnnnnnnnnnnnnnnnnnnnnnnnnnnnnnnnnnnnnnnnnnnnnnnnnnnnnnnnnnnnnnnnnnnnnnnnnnnnnnnnnnnnnnnnnnnnnnnnnnnnnnnnnnnnnnnnnnnnnnnnnnnnnnnnnnnnnnnnnnnnnnnnnnnnnnnnnnnnnnnnnnnnnnnnnnnnnnnnnnnnnnnnnnnnnnnnnnnnnnnnnnnnnnnnnnnnnnnnnnnnnnnnnnnnnnnnnnnnnnnnnnnnnnnnnnnnnnnnnnnnnnnnnnnnnnnnnnnnnnnnnnnnnnnnnnnnnnnnnnnnnnnnnnnnnnnnnnnnnnnnnnnnnnnnnnnnnnnnnnnnnnnnnnnnnnnnnnnnnnnnnnnnnnnnnnnnnnnnnnnnnnnnnnnnnnnnnnnnnnnnnnnnnnnnnnnnnnnnnnnnnnnnnnnnnnnnnnnnnnnnnnnnnnnnnnnnnnnnnnnnnnnnnnnnnnnnnnnnnnnnnnnnnnnnnnnnnnnnnnnnnnnnnnnnnnnnnnnnnnnnnnnnnnnnnnnnnnnnnnnnnnnnnnnnnnnnnnnnnnnnnnnnnnnnnnnnnnnnnnnnnnnnnnnnnnnnnnnnnnnnnnnnnnnnnnnnnnnnnnnnnnnnnnnnnnnnnnnnnnnnnnnnnnnnnnnnnnnnnnnnnnnnnnnnnnnnnnnnnnnnnnnnnnnnnnnnnnnnnnnnnnnnnnnnnnnnnnnnnnnnnnnnnnnnnnnnnnnnnnnnnnnnnnnnnnnnnnnnnnnnnnnnnnnnnnnnnnnnnnnnnnnnnnnnnnnnnnnnnnnnnnnnnnnnnnnnnnnnnnnnnnnnnnnnnnnnnnnnnnnnnnnnnnnnnnnnnnnnnnnnnnnnnnnnnnnnnnnnnnnnnnnnnnnnnnnnnnnnnnnnnnnnnnnnnnnnnnnnnnnnnnnnnnnnnnnnnnnnnnnnnnnnnnnnnnnnnnnnnnnnnnnnnnnnnnnnnnnnnnnnnnnnnnnnnnnnnnnnnnnnnnnnnnnnnnnnnnnnnnnnnnnnnnnnnnnnnnnnnnnnnnnnnnnnnnnnnnnnnnnnnnnnnnnnnnnnnnnnnnnnnnnnnnnnnnnnnnnnnnnnnnnnnnnnnnnnnnnnnnnnnnnnnnnnnnnnnnnnnnnnnnnnnnnnnnnnnnnnnnnnnnnnnnnnnnnnnnnnnnnnnnnnnnnnnnnnnnnnnnnnnnnnnnnnnnnnnnnnnnnnnnnnnnnnnnnnnnnnnnnnnnnnnnnnnnnnnnnnnnnnnnnnnnnnnnnnnnnnnnnnnnnnnnnnnnnnnnnnnnnnnnnnnnnnnnnnnnnnnnnnnnnnnnnnnnnnnnnnnnnnnnnnnnnnnnnnnnnnnnnnnnnnnnnnnnnnnnnnnnnnnnnnnnnnnnnnnnnnnnnnnnnnnnnnnnnnnnnnnnnnnnnnnnnnnnnnnnnnnnnnnnnnnnnnnnnnnnnnnnnnnnnnnnnnnnnnnnnnnnnnnnnnnnnnnnnnnnnnnnnnnnnnnnnnnnnnnnnnnnnnnnnnnnnnnnnnnnnnnnnnnnnnnnnnnnnnnnnnnnnnnnnnnnnnnnnnnnnnnnnnnnnnnnnnnnnnnnnnnnnnnnnnnnnnnnnnnnnnnnnnnnnnnnnnnnnnnnnnnnnnnnnnnnnnnnnnnnnnnnnnnnnnnnnnnnnnnnnnnnnnnnnnnnnnnnnnnnnnnnnnnnnnnnnnnnnnnnnnnnnnnnnnnnnnnnnnnnnnnnnnnnnnnnnnnnnnnnnnnnnnnnnnnnnnnnnnnnnnnnnnnnnnnnnnnnnnnnnnnnnnnnnnnnnnnnnnnnnnnnnnnnnnnnnnnnnnnnnnnnnnnnnnnnnnnnnnnnnnnnnnnnnnnnnnnnnnnnnnnnnnnnnnnnnnnnnnnnnnnnnnnnnnnnnnnnnnnnnnnnnnnnnnnnnnnnnnnnnnnnnnnnnnnnnnnnnnnnnnnnnnnnnnnnnnnnnnnnnnnnnnnnnnnnnnnnnnnnnnnnnnnnnnnnnnnnnnnnnnnnnnnnnnnnnnnnnnnnnnnnnnnnnnnnnnnnnnnnnnnnnnnnnnnnnnnnnnnnnnnnnnnnnnnnnnnnnnnnnnnnnnnnnnnnnnnnnnnnnnnnnnnnnnnnnnnnnnnnnnnnnnnnnnnnnnnnnnnnnnnnnnnnnnnnnnnnnnnnnnnnnnnnnnnnnnnnnnnnnnnnnnnnnnnnnnnnnnnnnnnnnnnnnnnnnnnnnnnnnnnnnnnnnnnnnnnnnnnnnnnnnnnnnnnnnnnnnnnnnnnnnnnnnnnnnnnnnnnnnnnnnnnnnnnnnnnnnnnnnnnnnnnnnnnnnnnnnnnnnnnnnnnnnnnnnnnnnnnnnnnnnnnnnnnnnnnnnnnnnnnnnnnnnnnnnnnnnnnnnnnnnnnnnnnnnnnnnnnnnnnnnnnnnnnnnnnnnnnnnnnnnnnnnnnnnnnnnnnnnnnnnnnnnnnnnnnnnnnnnnnnnnnnnnnnnnnnnnnnnnnnnnnnnnnnnnnnnnnnnnnnnnnnnnnnnnnnnnnnnnnnnnnnnnnnnnnnnnnnnnnnnnnnnnnnnnnnnnnnnnnnnnnnnnnnnnnnnnnnnnnnnnnnnnnnnnnnnnnnnnnnnnnnnnnnnnnnnnnnnnnnnnnnnnnnnnnnnnnnnnnnnnnnnnnnnnnnnnnnnnnnnnnnnnnnnnnnnnnnnnnnnnnnnnnnnnnnnnnnnnnnnnnnnnnnnnnnnnnnnnnnnnnnnnnnnnnnnnnnnnnnnnnnnnnnnnnnnnnnnnnnnnnnnnnnnnnnnnnnnnnnnnnnnnnnnnnnnnnnnnnnnnnnnnnnnnnnnnnnnnnnnnnnnnnnnnnnnnnnnnnnnnnnnnnnnnnnnnnnnnnnnnnnnnnnnnnnnnnnnnnnnnnnnnnnnnnnnnnnnnnnnnnnnnnnnnnnnnnnnnnnnnnnnnnnnnnnnnnnnnnnnnnnnnnnnnnnnnnnnnnnnnnnnnnnnnnnnnnnnnnnnnnnnnnnnnnnnnnnnnnnnnnnnnnnnnnnnnnnnnnnnnnnnnnnnnnnnnnnnnnnnnnnnnnnnnnnnnnnnnnnnnnnnnnnnnnnnnnnnnnnnnnnnnnnnnnnnnnnnnnnnnnnnnnnnnnnnnnnnnnnnnnnnnnnnnnnnnnnnnnnnnnnnnnnnnnnnnnnnnnnnnnnnnnnnnnnnnnnnnnnnnnnnnnnnnnnnnnnnnnnnnnnnnnnnnnnnnnnnnnnnnnnnnnnnnnnnnnnnnnnnnnnnnnnnnnnnnnnnnnnnnnnnnnnnnnnnnnnnnnnnnnnnnnnnnnnnnnnnnnnnnnnnnnnnnnnnnnnnnnnnnnnnnnnnnnnnnnnnnnnnnnnnnnnnnnnnnnnnnnnnnnnnnnnnnnnnnnnnnnnnnnnnnnnnnnnnnnnnnnnnnnnnnnnnnnnnnnnnnnnnnnnnnnnnnnnnnnnnnnnnnnnnnnnnnnnnnnnnnnnnnnnnnnnnnnnnnnnnnnnnnnnnnnnnnnnnnnnnnnnnnnnnnnnnnnnnnnnnnnnnnnnnnnnnnnnnnnnnnnnnnnnnnnnnnnnnnnnnnnnnnnnnnnnnnnnnnnnnnnnnnnnnnnnnnnnnnnnnnnnnnnnnnnnnnnnnnnnnnnnnnnnnnnnnnnnnnnnnnnnnnnnnnnnnnnnnnnnnnnnnnnnnnnnnnnnnnnnnnnnnnnnnnnnnnnnnnnnnnnnnnnnnnnnnnnnnnnnnnnnnnnnnnnnnnnnnnnnnnnnnnnnnnnnnnnnnnnnnnnnnnnnnnnnnnnnnnnnnnnnnnnnnnnnnnnnnnnnnnnnnnnnnnnnnnnnnnnnnnnnnnnnnnnnnnnnnnnnnnnnnnnnnnnnnnnnnnnnnnnnnnnnnnnnnnnnnnnnnnnnnnnnnnnnnnnnnnnnnnnnnnnnnnnnnnnnnnnnnnnnnnnnnnnnnnnnnnnnnnnnnnnnnnnnnnnnnnnnnnnnnnnnnnnnnnnnnnnnnnnnnnnnnnnnnnnnnnnnnnnnnnnnnnnnnnnnnnnnnnnnnnnnnnnnnnnnnnnnnnnnnnnnnnnnnnnnnnnnnnnnnnnnnnnnnnnnnnnnnnnnnnnnnnnnnnnnnnnnnnnnnnnnnnnnnnnnnnnnnnnnnnnnnnnnnnnnnnnnnnnnnnnnnnnnnnnnnnnnnnnnnnnnnnnnnnnnnnnnnnnnnnnnnnnnnnnnnnnnnnnnnnnnnnnnnnnnnnnnnnnnnnnnnnnnnnnnnnnnnnnnnnnnnnnnnnnnnnnnnnnnnnnnnnnnnnnnnnnnnnnnnnnnnnnnnnnnnnnnnnnnnnnnnnnnnnnnnnnnnnnnnnnnnnnnnnnnnnnnnnnnnnnnnnnnnnnnnnnnnnnnnnnnnnnnnnnnnnnnnnnnnnnnnnnnnnnnnnnnnnnnnnnnnnnnnnnnnnnnnnnnnnnnnnnnnnnnnnnnnnnnnnnnnnnnnnnnnnnnnnnnnnnnnnnnnnnnnnnnnnnnnnnnnnnnnnnnnnnnnnnnnnnnnnnnnnnnnnnnnnnnnnnnnnnnnnnnnnnnnnnnnnnnnnnnnnnnnnnnnnnnnnnnnnnnnnnnnnnnnnnnnnnnnnnnnnnnnnnnnnnnnnnnnnnnnnnnnnnnnnnnnnnnnnnnnnnnnnnnnnnnnnnnnnnnnnnnnnnnnnnnnnnnnnnnnnnnnnnnnnnnnnnnnnnnnnnnnnnnnnnnnnnnnnnnnnnnnnnnnnnnnnnnnnnnnnnnnnnnnnnnnnnnnnnnnnnnnnnnnnnnnnnnnnnnnnnnnnnnnnnnnnnnnnnnnnnnnnnnnnnnnnnnnnnnnnnnnnnnnnnnnnnnnnnnnnnnnnnnnnnnnnnnnnnnnnnnnnnnnnnnnnnnnnnnnnnnnnnnnnnnnnnnnnnnnnnnnnnnnnnnnnnnnnnnnnnnnnnnnnnnnnnnnnnnnnnnnnnnnnnnnnnnnnnnnnnnnnnnnnnnnnnnnnnnnnnnnnnnnnnnnnnnnnnnnnnnnnnnnnnnnnnnnnnnnnnnnnnnnnnnnnnnnnnnnnnnnnnnnnnnnnnnnnnnnnnnnnnnnnnnnnnnnnnnnnnnnnnnnnnnnnnnnnnnnnnnnnnnnnnnnnnnnnnnnnnnnnnnnnnnnnnnnnnnnnnnnnnnnnnnnnnnnnnnnnnnnnnnnnnnnnnnnnnnnnnnnnnnnnnnnnnnnnnnnnnnnnnnnnnnnnnnnnnnnnnnnnnnnnnnnnnnnnnnnnnnnnnnnnnnnnnnnnnnnnnnnnnnnnnnnnnnnnnnnnnnnnnnnnnnnnnnnnnnnnnnnnnnnnnnnnnnnnnnnnnnnnnnnnnnnnnnnnnnnnnnnnnnnnnnnnnnnnnnnnnnnnnnnnnnnnnnnnnnnnnnnnnnnnnnnnnnnnnnnnnnnnnnnnnnnnnnnnnnnnnnnnnnnnnnnnnnnnnnnnnnnnnnnnnnnnnnnnnnnnnnnnnnnnnnnnnnnnnnnnnnnnnnnnnnnnnnnnnnnnnnnnnnnnnnnnnnnnnnnnnnnnnnnnnnnnnnnnnnnnnnnnnnnnnnnnnnnnnnnnnnnnnnnnnnnnnnnnnnnnnnnnnnnnnnnnnnnnnnnnnnnnnnnnnnnnnnnnnnnnnnnnnnnnnnnnnnnnnnnnnnnnnnnnnnnnnnnnnnnnnnnnnnnnnnnnnnnnnnnnnnnnnnnnnnnnnnnnnnnnnnnnnnnnnnnnnnnnnnnnnnnnnnnnnnnnnnnnnnnnnnnnnnnnnnnnnnnnnnnnnnnnnnnnnnnnnnnnnnnnnnnnnnnnnnnnnnnnnnnnnnnnnnnnnnnnnnnnnnnnnnnnnnnnnnnnnnnnnnnnnnnnnnnnnnnnnnnnnnnnnnnnnnnnnnnnnnnnnnnnnnnnnnnnnnnnnnnnnnnnnnnnnnnnnnnnnnnnnnnnnnnnnnnnnnnnnnnnnnnnnnnnnnnnnnnnnnnnnnnnnnnnnnnnnnnnnnnnnnnnnnnnnnnnnnnnnnnnnnnnnnnnnnnnnnnnnnnnnnnnnnnnnnnnnnnnnnnnnnnnnnnnnnnnnnnnnnnnnnnnnnnnnnnnnnnnnnnnnnnnnnnnnnnnnnnnnnnnnnnnnnnnnnnnnnnnnnnnnnnnnnnnnnnnnnnnnnnnnnnnnnnnnnnnnnnnnnnnnnnnnnnnnnnnnnnnnnnnnnnnnnnnnnnnnnnnnnnnnnnnnnnnnnnnnnnnnnnnnnnnnnnnnnnnnnnnnnnnnnnnnnnnnnnnnnnnnnnnnnnnnnnnnnnnnnnnnnnnnnnnnnnnnnnnnnnnnnnnnnnnnnnnnnnnnnnnnnnnnnnnnnnnnnnnnnnnnnnnnnnnnnnnnnnnnnnnnnnnnnnnnnnnnnnnnnnnnnnnnnnnnnnnnnnnnnnnnnnnnnnnnnnnnnnnnnnnnnnnnnnnnnnnnnnnnnnnnnnnnnnnnnnnnnnnnnnnnnnnnnnnnnnnnnnnnnnnnnnnnnnnnnnnnnnnnnnnnnnnnnnnnnnnnnnnnnnnnnnnnnnnnnnnnnnnnnnnnnnnnnnnnnnnnnnnnnnnnnnnnnnnnnnnnnnnnnnnnnnnnnnnnnnnnnnnnnnnnnnnnnnnnnnnnnnnnnnnnnnnnnnnnnnnnnnnnnnnnnnnnnnnnnnnnnnnnnnnnnnnnnnnnnnnnnnnnnnnnnnnnnnnnnnnnnnnnnnnnnnnnnnnnnnnnnnnnnnnnnnnnnnnnnnnnnnnnnnnnnnnnnnnnnnnnnnnnnnnnnnnnnnnnnnnnnnnnnnnnnnnnnnnnnnnnnnnnnnnnnnnnnnnnnnnnnnnnnnnnnnnnnnnnnnnnnnnnnnnnnnnnnnnnnnnnnnnnnnnnnnnnnnnnnnnnnnnnnnnnnnnnnnnnnnnnnnnnnnnnnnnnnnnnnnnnnnnnnnnnnnnnnnnnnnnnnnnnnnnnnnnnnnnnnnnnnnnnnnnnnnnnnnnnnnnnnnnnnnnnnnnnnnnnnnnnnnnnnnnnnnnnnnnnnnnnnnnnnnnnnnnnnnnnnnnnnnnnnnnnnnnnnnnnnnnnnnnnnnnnnnnnnnnnnnnnnnnnnnnnnnnnnnnnnnnnnnnnnnnnnnnnnnnnnnnnnnnnnnnnnnnnnnnnnnnnnnnnnnnnnnnnnnnnnnnnnnnnnnnnnnnnnnnnnnnnnnnnnnnnnnnnnnnnnnnnnnnnnnnnnnnnnnnnnnnnnnnnnnnnnnnnnnnnnnnnnnnnnnnnnnnnnnnnnnnnnnnnnnnnnnnnnnnnnnnnnnnnnnnnnnnnnnnnnnnnnnnnnnnnnnnnnnnnnnnnnnnnnnnnnnnnnnnnnnnnnnnnnnnnnnnnnnnnnnnnnnnnnnnnnnnnnnnnnnnnnnnnnnnnnnnnnnnnnnnnnnnnnnnnnnnnnnnnnnnnnnnnnnnnnnnnnnnnnnnnnnnnnnnnnnnnnnnnnnnnnnnnnnnnnnnnnnnnnnnnnnnnnnnnnnnnnnnnnnnnnnnnnnnnnnnnnnnnnnnnnnnnnnnnnnnnnnnnnnnnnnnnnnnnnnnnnnnnnnnnnnnnnnnnnnnnnnnnnnnnnnnnnnnnnnnnnnnnnnnnnnnnnnnnnnnnnnnnnnnnnnnnnnnnnnnnnnnnnnnnnnnnnnnnnnnnnnnnnnnnnnnnnnnnnnnnnnnnnnnnnnnnnnnnnnnnnnnnnnnnnnnnnnnnnnnnnnnnnnnnnnnnnnnnnnnnnnnnnnnnnnnnnnnnnnnnnnnnnnnnnnnnnnnnnnnnnnnnnnnnnnnnnnnnnnnnnnnnnnnnnnnnnnnnnnnnnnnnnnnnnnnnnnnnnnnnnnnnnnnnnnnnnnnnnnnnnnnnnnnnnnnnnnnnnnnnnnnnnnnnnnnnnnnnnnnnnnnnnnnnnnnnnnnnnnnnnnnnnnnnnnnnnnnnnnnnnnnnnnnnnnnnnnnnnnnnnnnnnnnnnnnnnnnnnnnnnnnnnnnnnnnnnnnnnnnnnnnnnnnnnnnnnnnnnnnnnnnnnnnnnnnnnnnnnnnnnnnnnnnnnnnnnnnnnnnnnnnnnnnnnnnnnnnnnnnnnnnnnnnnnnnnnnnnnnnnnnnnnnnnnnnnnnnnnnnnnnnnnnnnnnnnnnnnnnnnnnnnnnnnnnnnnnnnnnnnnnnnnnnnnnnnnnnnnnnnnnnnnnnnnnnnnnnnnnnnnnnnnnnnnnnnnnnnnnnnnnnnnnnnnnnnnnnnnnnnnnnnnnnnnnnnnnnnnnnnnnnnnnnnnnnnnnnnnnnnnnnnnnnnnnnnnnnnnnnnnnnnnnnnnnnnnnnnnnnnnnnnnnnnnnnnnnnnnnnnnnnnnnnnnnnnnnnnnnnnnnnnnnnnnnnnnnnnnnnnnnnnnnnnnnnnnnnnnnnnnnnnnnnnnnnnnnnnnnnnnnnnnnnnnnnnnnnnnnnnnnnnnnnnnnnnnnnnnnnnnnnnnnnnnnnnnnnnnnnnnnnnnnnnnnnnnnnnnnnnnnnnnnnnnnnnnnnnnnnnnnnnnnnnnnnnnnnnnnnnnnnnnnnnnnnnnnnnnnnnnnnnnnnnnnnnnnnnnnnnnnnnnnnnnnnnnnnnnnnnnnnnnnnnnnnnnnnnnnnnnnnnnnnnnnnnnnnnnnnnnnnnnnnnnnnnnnnnnnnnnnnnnnnnnnnnnnnnnnnnnnnnnnnnnnnnnnnnnnnnnnnnnnnnnnnnnnnnnnnnnnnnnnnnnnnnnnnnnnnnnnnnnnnnnnnnnnnnnnnnnnnnnnnnnnnnnnnnnnnnnnnnnnnnnnnnnnnnnnnnnnnnnnnnnnnnnnnnnnnnnnnnnnnnnnnnnnnnnnnnnnnnnnnnnnnnnnnnnnnnnnnnnnnnnnnnnnnnnnnnnnnnnnnnnnnnnnnnnnnnnnnnnnnnnnnnnnnnnnnnnnnnnnnnnnnnnnnnnnnnnnnnnnnnnnnnnnnnnnnnnnnnnnnnnnnnnnnnnnnnnnnnnnnnnnnnnnnnnnnnnnnnnnnnnnnnnnnnnnnnnnnnnnnnnnnnnnnnnnnnnnnnnnnnnnnnnnnnnnnnnnnnnnnnnnnnnnnnnnnnnnnnnnnnnnnnnnnnnnnnnnnnnnnnnnnnnnnnnnnnnnnnnnnnnnnnnnnnnnnnnnnnnnnnnnnnnnnnnnnnnnnnnnnnnnnnnnnnnnnnnnnnnnnnnnnnnnnnnnnnnnnnnnnnnnnnnnnnnnnnnnnnnnnnnnnnnnnnnnnnnnnnnnnnnnnnnnnnnnnnnnnnnnnnnnnnnnnnnnnnnnnnnnnnnnnnnnnnnnnnnnnnnnnnnnnnnnnnnnnnnnnnnnnnnnnnnnnnnnnnnnnnnnnnnnnnnnnnnnnnnnnnnnnnnnnnnnnnnnnnnnnnnnnnnnnnnnnnnnnnnnnnnnnnnnnnnnnnnnnnnnnnnnnnnnnnnnnnnnnnnnnnnnnnnnnnnnnnnnnnnnnnnnnnnnnnnnnnnnnnnnnnnnnnnnnnnnnnnnnnnnnnnnnnnnnnnnnnnnnnnnnnnnnnnnnnnnnnnnnnnnnnnnnnnnnnnnnnnnnnnnnnnnnnnnnnnnnnnnnnnnnnnnnnnnnnnnnnnnnnnnnnnnnnnnnnnnnnnnnnnnnnnnnnnnnnnnnnnnnnnnnnnnnnnnnnnnnnnnnnnnnnnnnnnnnnnnnnnnnnnnnnnnnnnnnnnnnnnnnnnnnnnnnnnnnnnnnnnnnnnnnnnnnnnnnnnnnnnnnnnnnnnnnnnnnnnnnnnnnnnnnnnnnnnnnnnnnnnnnnnnnnnnnnnnnnnnnnnnnnnnnnnnnnnnnnnnnnnnnnnnnnnnnnnnnnnnnnnnnnnnnnnnnnnnnnnnnnnnnnnnnnnnnnnnnnnnnnnnnnnnnnnnnnnnnnnnnnnnnnnnnnnnnnnnnnnnnnnnnnnnnnnnnnnnnnnnnnnnnnnnnnnnnnnnnnnnnnnnnnnnnnnnnnnnnnnnnnnnnnnnnnnnnnnnnnnnnnnnnnnnnnnnnnnnnnnnnnnnnnnnnnnnnnnnnnnnnnnnnnnnnnnnnnnnnnnnnnnnnnnnnnnnnnnnnnnnnnnnnnnnnnnnnnnnnnnnnnnnnnnnnnnnnnnnnnnnnnnnnnnnnnnnnnnnnnnnnnnnnnnnnnnnnnnnnnnnnnnnnnnnnnnnnnnnnnnnnnnnnnnnnnnnnnnnnnnnnnnnnnnnnnnnnnnnnnnnnnnnnnnnnnnnnnnnnnnnnnnnnnnnnnnnnnnnnnnnnnnnnnnnnnnnnnnnnnnnnnnnnnnnnnnnnnnnnnnnnnnnnnnnnnnnnnnnnnnnnnnnnnnnnnnnnnnnnnnnnnnnnnnnnnnnnnnnnnnnnnnnnnnnnnnnnnnnnnnnnnnnnnnnnnnnnnnnnnnnnnnnnnnnnnnnnnnnnnnnnnnnnnnnnnnnnnnnnnnnnnnnnnnnnnnnnnnnnnnnnnnnnnnnnnnnnnnnnnnnnnnnnnnnnnnnnnnnnnnnnnnnnnnnnnnnnnnnnnnnnnnnnnnnnnnnnnnnnnnnnnnnnnnnnnnnnnnnnnnnnnnnnnnnnnnnnnnnnnnnnnnnnnnnnnnnnnnnnnnnnnnnnnnnnnnnnnnnnnnnnnnnnnnnnnnnnnnnnnnnnnnnnnnnnnnnnnnnnnnnnnnnnnnnnnnnnnnnnnnnnnnnnnnnnnnnnnnnnnnnnnnnnnnnnnnnnnnnnnnnnnnnnnnnnnnnnnnnnnnnnnnnnnnnnnnnnnnnnnnnnnnnnnnnnnnnnnnnnnnnnnnnnnnnnnnnnnnnnnnnnnnnnnnnnnnnnnnnnnnnnnnnnnnnnnnnnnnnnnnnnnnnnnnnnnnnnnnnnnnnnnnnnnnnnnnnnnnnnnnnnnnnnnnnnnnnnnnnnnnnnnnnnnnnnnnnnnnnnnnnnnnnnnnnnnnnnnnnnnnnnnnnnnnnnnnnnnnnnnnnnnnnnnnnnnnnnnnnnnnnnnnnnnnnnnnnnnnnnnnnnnnnnnnnnnnnnnnnnnnnnnnnnnnnnnnnnnnnnnnnnnnnnnnnnnnnnnnnnnnnnnnnnnnnnnnnnnnnnnnnnnnnnnnnnnnnnnnnnnnnnnnnnnnnnnnnnnnnnnnnnnnnnnnnnnnnnnnnnnnnnnnnnnnnnnnnnnnnnnnnnnnnnnnnnnnnnnnnnnnnnnnnnnnnnnnnnnnnnnnnnnnnnnnnnnnnnnnnnnnnnnnnnnnnnnnnnnnnnnnnnnnnnnnnnnnnnnnnnnnnnnnnnnnnnnnnnnnnnnnnnnnnnnnnnnnnnnnnnnnnnnnnnnnnnnnnnnnnnnnnnnnnnnnnnnnnnnnnnnnnnnnnnnnnnnnnnnnnnnnnnnnnnnnnnnnnnnnnnnnnnnnnnnnnnnnnnnnnnnnnnnnnnnnnnnnnnnnnnnnnnnnnnnnnnnnnnnnnnnnnnnnnnnnnnnnnnnnnnnnnnnnnnnnnnnnnnnnnnnnnnnnnnnnnnnnnnnnnnnnnnnnnnnnnnnnnnnnnnnnnnnnnnnnnnnnnnnnnnnnnnnnnnnnnnnnnnnnnnnnnnnnnnnnnnnnnnnnnnnnnnnnnnnnnnnnnnnnnnnnnnnnnnnnnnnnnnnnnnnnnnnnnnnnnnnnnnnnnnnnnnnnnnnnnnnnnnnnnnnnnnnnnnnnnnnnnnnnnnnnnnnnnnnnnnnnnnnnnnnnnnnnnnnnnnnnnnnnnnnnnnnnnnnnnnnnnnnnnnnnnnnnnnnnnnnnnnnnnnnnnnnnnnnnnnnnnnnnnnnnnnnnnnnnnnnnnnnnnnnnnnnnnnnnnnnnnnnnnnnnnnnnnnnnnnnnnnnnnnnnnnnnnnnnnnnnnnnnnnnnnnnnnnnnnnnnnnnnnnnnnnnnnnnnnnnnnnnnnnnnnnnnnnnnnnnnnnnnnnnnnnnnnnnnnnnnnnnnnnnnnnnnnnnnnnnnnnnnnnnnnnnnnnnnnnnnnnnnnnnnnnnnnnnnnnnnnnnnnnnnnnnnnnnnnnnnnnnnnnnnnnnnnnnnnnnnnnnnnnnnnnnnnnnnnnnnnnnnnnnnnnnnnnnnnnnnnnnnnnnnnnnnnnnnnnnnnnnnnnnnnnnnnnnnnnnnnnnnnnnnnnnnnnnnnnnnnnnnnnnnnnnnnnnnnnnnnnnnnnnnnnnnnnnnnnnnnnnnnnnnnnnnnnnnnnnnnnnnnnnnnnnnnnnnnnnnnnnnnnnnnnnnnnnnnnnnnnnnnnnnnnnnnnnnnnnnnnnnnnnnnnnnnnnnnnnnnnnnnnnnnnnnnnnnnnnnnnnnnnnnnnnnnnnnnnnnnnnnnnnnnnnnnnnnnnnnnnnnnnnnnnnnnnnnnnnnnnnnnnnnnnnnnnnnnnnnnnnnnnnnnnnnnnnnnnnnnnnnnnnnnnnnnnnnnnnnnnnnnnnnnnnnnnnnnnnnnnnnnnnnnnnnnnnnnnnnnnnnnnnnnnnnnnnnnnnnnnnnnnnnnnnnnnnnnnnnnnnnnnnnnnnnnnnnnnnnnnnnnnnnnnnnnnnnnnnnnnnnnnnnnnnnnnnnnnnnnnnnnnnnnnnnnnnnnnnnnnnnnnnnnnnnnnnnnnnnnnnnnnnnnnnnnnnnnnnnnnnnnnnnnnnnnnnnnnnnnnnnnnnnnnnnnnnnnnnnnnnnnnnnnnnnnnnnnnnnnnnnnnnnnnnnnnnnnnnnnnnnnnnnnnnnnnnnnnnnnnnnnnnnnnnnnnnnnnnnnnnnnnnnnnnnnnnnnnnnnnnnnnnnnnnnnnnnnnnnnnnnnnnnnnnnnnnnnnnnnnnnnnnnnnnnnnnnnnnnnnnnnnnnnnnnnnnnnnnnnnnnnnnnnnnnnnnnnnnnnnnnnnnnnnnnnnnnnnnnnnnnnnnnnnnnnnnnnnnnnnnnnnnnnnnnnnnnnnnnnnnnnnnnnnnnnnnnnnnnnnnnnnnnnnnnnnnnnnnnnnnnnnnnnnnnnnnnnnnnnnnnnnnnnnnnnnnnnnnnnnnnnnnnnnnnnnnnnnnnnnnnnnnnnnnnnnnnnnnnnnnnnnnnnnnnnnnnnnnnnnnnnnnnnnnnnnnnnnnnnnnnnnnnnnnnnnnnnnnnnnnnnnnnnnnnnnnnnnnnnnnnnnnnnnnnnnnnnnnnnnnnnnnnnnnnnnnnnnnnnnnnnnnnnnnnnnnnnnnnnnnnnnnnnnnnnnnnnnnnnnnnnnnnnnnnnnnnnnnnnnnnnnnnnnnnnnnnnnnnnnnnnnnnnnnnnnnnnnnnnnnnnnnnnnnnnnnnnnnnnnnnnnnnnnnnnnnnnnnnnnnnnnnnnnnnnnnnnnnnnnnnnnnnnnnnnnnnnnnnnnnnnnnnnnnnnnnnnnnnnnnnnnnnnnnnnnnnnnnnnnnnnnnnnnnnnnnnnnnnnnnnnnnnnnnnnnnnnnnnnnnnnnnnnnnnnnnnnnnnnnnnnnnnnnnnnnnnnnnnnnnnnnnnnnnnnnnnnnnnnnnnnnnnnnnnnnnnnnnnnnnnnnnnnnnnnnnnnnnnnnnnnnnnnnnnnnnnnnnnnnnnnnnnnnnnnnnnnnnnnnnnnnnnnnnnnnnnnnnnnnnnnnnnnnnnnnnnnnnnnnnnnnnnnnnnnnnnnnnnnnnnnnnnnnnnnnnnnnnnnnnnnnnnnnnnnnnnnnnnnnnnnnnnnnnnnnnnnnnnnnnnnnnnnnnnnnnnnnnnnnnnnnnnnnnnnnnnnnnnnnnnnnnnnnnnnnnnnnnnnnnnnnnnnnnnnnnnnnnnnnnnnnnnnnnnnnnnnnnnnnnnnnnnnnnnnnnnnnnnnnnnnnnnnnnnnnnnnnnnnnnnnnnnnnnnnnnnnnnnnnnnnnnnnnnnnnnnnnnnnnnnnnnnnnnnnnnnnnnnnnnnnnnnnnnnnnnnnnnnnnnnnnnnnnnnnnnnnnnnnnnnnnnnnnnnnnnnnnnnnnnnnnnnnnnnnnnnnnnnnnnnnnnnnnnnnnnnnnnnnnnnnnnnnnnnnnnnnnnnnnnnnnnnnnnnnnnnnnnnnnnnnnnnnnnnnnnnnnnnnnnnnnnnnnnnnnnnnnnnnnnnnnnnnnnnnnnnnnnnnnnnnnnnnnnnnnnnnnnnnnnnnnnnnnnnnnnnnnnnnnnnnnnnnnnnnnnnnnnnnnnnnnnnnnnnnnnnnnnnnnnnnnnnnnnnnnnnnnnnnnnnnnnnnnnnnnnnnnnnnnnnnnnnnnnnnnnnnnnnnnnnnnnnnnnnnnnnnnnnnnnnnnnnnnnnnnnnnnnnnnnnnnnnnnnnnnnnnnnnnnnnnnnnnnnnnnnnnnnnnnnnnnnnnnnnnnnnnnnnnnnnnnnnnnnnnnnnnnnnnnnnnnnnnnnnnnnnnnnnnnnnnnnnnnnnnnnnnnnnnnnnnnnnnnnnnnnnnnnnnnnnnnnnnnnnnnnnnnnnnnnnnnnnnnnnnnnnnnnnnnnnnnnnnnnnnnnnnnnnnnnnnnnnnnnnnnnnnnnnnnnnnnnnnnnnnnnnnnnnnnnnnnnnnnnnnnnnnnnnnnnnnnnnnnnnnnnnnnnnnnnnnnnnnnnnnnnnnnnnnnnnnnnnnnnnnnnnnnnnnnnnnnnnnnnnnnnnnnnnnnnnnnnnnnnnnnnnnnnnnnnnnnnnnnnnnnnnnnnnnnnnnnnnnnnnnnnnnnnnnnnnnnnnnnnnnnnnnnnnnnnnnnnnnnnnnnnnnnnnnnnnnnnnnnnnnnnnnnnnnnnnnnnnnnnnnnnnnnnnnnnnnnnnnnnnnnnnnnnnnnnnnnnnnnnnnnnnnnnnnnnnnnnnnnnnnnnnnnnnnnnnnnnnnnnnnnnnnnnnnnnnnnnnnnnnnnnnnnnnnnnnnnnnnnnnnnnnnnnnnnnnnnnnnnnnnnnnnnnnnnnnnnnnnnnnnnnnnnnnnnnnnnnnnnnnnnnnnnnnnnnnnnnnnnnnnnnnnnnnnnnnnnnnnnnnnnnnnnnnnnnnnnnnnnnnnnnnnnnnnnnnnnnnnnnnnnnnnnnnnnnnnnnnnnnnnnnnnnnnnnnnnnnnnnnnnnnnnnnnnnnnnnnnnnnnnnnnnnnnnnnnnnnnnnnnnnnnnnnnnnnnnnnnnnnnnnnnnnnnnnnnnnnnnnnnnnnnnnnnnnnnnnnnnnnnnnnnnnnnnnnnnnnnnnnnnnnnnnnnnnnnnnnnnnnnnnnnnnnnnnnnnnnnnnnnnnnnnnnnnnnnnnnnnnnnnnnnnnnnnnnnnnnnnnnnnnnnnnnnnnnnnnnnnnnnnnnnnnnnnnnnnnnnnnnnnnnnnnnnnnnnnnnnnnnnnnnnnnnnnnnnnnnnnnnnnnnnnnnnnnnnnnnnnnnnnnnnnnnnnnnnnnnnnnnnnnnnnnnnnnnnnnnnnnnnnnnnnnnnnnnnnnnnnnnnnnnnnnnnnnnnnnnnnnnnnnnnnnnnnnnnnnnnnnnnnnnnnnnnnnnnnnnnnnnnnnnnnnnnnnnnnnnnnnnnnnnnnnnnnnnnnnnnnnnnnnnnnnnnnnnnnnnnnnnnnnnnnnnnnnnnnnnnnnnnnnnnnnnnnnnnnnnnnnnnnnnnnnnnnnnnnnnnnnnnnnnnnnnnnnnnnnnnnnnnnnnnnnnnnnnnnnnnnnnnnnnnnnnnnnnnnnnnnnnnnnnnnnnnnnnnnnnnnnnnnnnnnnnnnnnnnnnnnnnnnnnnnnnnnnnnnnnnnnnnnnnnnnnnnnnnnnnnnnnnnnnnnnnnnnnnnnnnnnnnnnnnnnnnnnnnnnnnnnnnnnnnnnnnnnnnnnnnnnnnnnnnnnnnnnnnnnnnnnnnnnnnnnnnnnnnnnnnnnnnnnnnnnnnnnnnnnnnnnnnnnnnnnnnnnnnnnnnnnnnnnnnnnnnnnnnnnnnnnnnnnnnnnnnnnnnnnnnnnnnnnnnnnnnnnnnnnnnnnnnnnnnnnnnnnnnnnnnnnnnnnnnnnnnnnnnnnnnnnnnnnnnnnnnnnnnnnnnnnnnnnnnnnnnnnnnnnnnnnnnnnnnnnnnnnnnnnnnnnnnnnnnnnnnnnnnnnnnnnnnnnnnnnnnnnnnnnnnnnnnnnnnnnnnnnnnnnnnnnnnnnnnnnnnnnnnnnnnnnnnnnnnnnnnnnnnnnnnnnnnnnnnnnnnnnnnnnnnnnnnnnnnnnnnnnnnnnnnnnnnnnnnnnnnnnnnnnnnnnnnnnnnnnnnnnnnnnnnnnnnnnnnnnnnnnnnnnnnnnnnnnnnnnnnnnnnnnnnnnnnnnnnnnnnnnnnnnnnnnnnnnnnnnnnnnnnnnnnnnnnnnnnnnnnnnnnnnnnnnnnnnnnnnnnnnnnnnnnnnnnnnnnnnnnnnnnnnnnnnnnnnnnnnnnnnnnnnnnnnnnnnnnnnnnnnnnnnnnnnnnnnnnnnnnnnnnnnnnnnnnnnnnnnnnnnnnnnnnnnnnnnnnnnnnnnnnnnnnnnnnnnnnnnnnnnnnnnnnnnnnnnnnnnnnnnnnnnnnnnnnnnnnnnnnnnnnnnnnnnnnnnnnnnnnnnnnnnnnnnnnnnnnnnnnnnnnnnnnnnnnnnnnnnnnnnnnnnnnnnnnnnnnnnnnnnnnnnnnnnnnnnnnnnnnnnnnnnnnnnnnnnnnnnnnnnnnnnnnnnnnnnnnnnnnnnnnnnnnnnnnnnnnnnnnnnnnnnnnnnnnnnnnnnnnnnnnnnnnnnnnnnnnnnnnnnnnnnnnnnnnnnnnnnnnnnnnnnnnnnnnnnnnnnnnnnnnnnnnnnnnnnnnnnnnnnnnnnnnnnnnnnnnnnnnnnnnnnnnnnnnnnnnnnnnnnnnnnnnnnnnnnnnnnnnnnnnnnnnnnnnnnnnnnnnnnnnnnnnnnnnnnnnnnnnnnnnnnnnnnnnnnnnnnnnnnnnnnnnnnnnnnnnnnnnnnnnnnnnnnnnnnnnnnnnnnnnnnnnnnnnnnnnnnnnnnnnnnnnnnnnnnnnnnnnnnnnnnnnnnnnnnnnnnnnnnnnnnnnnnnnnnnnnnnnnnnnnnnnnnnnnnnnnnnnnnnnnnnnnnnnnnnnnnnnnnnnnnnnnnnnnnnnnnnnnnnnnnnnnnnnnnnnnnnnnnnnnnnnnnnnnnnnnnnnnnnnnnnnnnnnnnnnnnnnnnnnnnnnnnnnnnnnnnnnnnnnnnnnnnnnnnnnnnnnnnnnnnnnnnnnnnnnnnnnnnnnnnnnnnnnnnnnnnnnnnnnnnnnnnnnnnnnnnnnnnnnnnnnnnnnnnnnnnnnnnnnnnnnnnnnnnnnnnnnnnnnnnnnnnnnnnnnnnnnnnnnnnnnnnnnnnnnnnnnnnnnnnnnnnnnnnnnnnnnnnnnnnnnnnnnnnnnnnnnnnnnnnnnnnnnnnnnnnnnnnnnnnnnnnnnnnnnnnnnnnnnnnnnnnnnnnnnnnnnnnnnnnnnnnnnnnnnnnnnnnnnnnnnnnnnnnnnnnnnnnnnnnnnnnnnnnnnnnnnnnnnnnnnnnnnnnnnnnnnnnnnnnnnnnnnnnnnnnnnnnnnnnnnnnnnnnnnnnnnnnnnnnnnnnnnnnnnnnnnnnnnnnnnnnnnnnnnnnnnnnnnnnnnnnnnnnnnnnnnnnnnnnnnnnnnnnnnnnnnnnnnnnnnnnnnnnnnnnnnnnnnnnnnnnnnnnnnnnnnnnnnnnnnnnnnnnnnnnnnnnnnnnnnnnnnnnnnnnnnnnnnnnnnnnnnnnnnnnnnnnnnnnnnnnnnnnnnnnnnnnnnnnnnnnnnnnnnnnnnnnnnnnnnnnnnnnnnnnnnnnnnnnnnnnnnnnnnnnnnnnnnnnnnnnnnnnnnnnnnnnnnnnnnnnnnnnnnnnnnnnnnnnnnnnnnnnnnnnnnnnnnnnnnnnnnnnnnnnnnnnnnnnnnnnnnnnnnnnnnnnnnnnnnnnnnnnnnnnnnnnnnnnnnnnnnnnnnnnnnnnnnnnnnnnnnnnnnnnnnnnnnnnnnnnnnnnnnnnnnnnnnnnnnnnnnnnnnnnnnnnnnnnnnnnnnnnnnnnnnnnnnnnnnnnnnnnnnnnnnnnnnnnnnnnnnnnnnnnnnnnnnnnnnnnnnnnnnnnnnnnnnnnnnnnnnnnnnnnnnnnnnnnnnnnnnnnnnnnnnnnnnnnnnnnnnnnnnnnnnnnnnnnnnnnnnnnnnnnnnnnnnnnnnnnnnnnnnnnnnnnnnnnnnnnnnnnnnnnnnnnnnnnnnnnnnnnnnnnnnnnnnnnnnnnnnnnnnnnnnnnnnnnnnnnnnnnnnnnnnnnnnnnnnnnnnnnnnnnnnnnnnnnnnnnnnnnnnnnnnnnnnnnnnnnnnnnnnnnnnnnnnnnnnnnnnnnnnnnnnnnnnnnnnnnnnnnnnnnnnnnnnnnnnnnnnnnnnnnnnnnnnnnnnnnnnnnnnnnnnnnnnnnnnnnnnnnnnnnnnnnnnnnnnnnnnnnnnnnnnnnnnnnnnnnnnnnnnnnnnnnnnnnnnnnnnnnnnnnnnnnnnnnnnnnnnnnnnnnnnnnnnnnnnnnnnnnnnnnnnnnnnnnnnnnnnnnnnnnnnnnnnnnnnnnnnnnnnnnnnnnnnnnnnnnnnnnnnnnnnnnnnnnnnnnnnnnnnnnnnnnnnnnnnnnnnnnnnnnnnnnnnnnnnnnnnnnnnnnnnnnnnnnnnnnnnnnnnnnnnnnnnnnnnnnnnnnnnnnnnnnnnnnnnnnnnnnnnnnnnnnnnnnnnnnnnnnnnnnnnnnnnnnnnnnnnnnnnnnnnnnnnnnnnnnnnnnnnnnnnnnnnnnnnnnnnnnnnnnnnnnnnnnnnnnnnnnnnnnnnnnnnnnnnnnnnnnnnnnnnnnnnnnnnnnnnnnnnnnnnnnnnnnnnnnnnnnnnnnnnnnnnnnnnnnnnnnnnnnnnnnnnnnnnnnnnnnnnnnnnnnnnnnnnnnnnnnnnnnnnnnnnnnnnnnnnnnnnnnnnnnnnnnnnnnnnnnnnnnnnnnnnnnnnnnnnnnnnnnnnnnnnnnnnnnnnnnnnnnnnnnnnnnnnnnnnnnnnnnnnnnnnnnnnnnnnnnnnnnnnnnnnnnnnnnnnnnnnnnnnnnnnnnnnnnnnnnnnnnnnnnnnnnnnnnnnnnnnnnnnnnnnnnnnnnnnnnnnnnnnnnnnnnnnnnnnnnnnnnnnnnnnnnnnnnnnnnnnnnnnnnnnnnnnnnnnnnnnnnnnnnnnnnnnnnnnnnnnnnnnnnnnnnnnnnnnnnnnnnnnnnnnnnnnnnnnnnnnnnnnnnnnnnnnnnnnnnnnnnnnnnnnnnnnnnnnnnnnnnnnnnnnnnnnnnnnnnnnnnnnnnnnnnnnnnnnnnnnnnnnnnnnnnnnnnnnnnnnnnnnnnnnnnnnnnnnnnnnnnnnnnnnnnnnnnnnnnnnnnnnnnnnnnnnnnnnnnnnnnnnnnnnnnnnnnnnnnnnnnnnnnnnnnnnnnnnnnnnnnnnnnnnnnnnnnnnnnnnnnnnnnnnnnnnnnnnnnnnnnnnnnnnnnnnnnnnnnnnnnnnnnnnnnnnnnnnnnnnnnnnnnnnnnnnnnnnnnnnnnnnnnnnnnnnnnnnnnnnnnnnnnnnnnnnnnnnnnnnnnnnnnnnnnnnnnnnnnnnnnnnnnnnnnnnnnnnnnnnnnnnnnnnnnnnnnnnnnnnnnnnnnnnnnnnnnnnnnnnnnnnnnnnnnnnnnnnnnnnnnnnnnnnnnnnnnnnnnnnnnnnnnnnnnnnnnnnnnnnnnnnnnnnnnnnnnnnnnnnnnnnnnnnnnnnnnnnnnnnnnnnnnnnnnnnnnnnnnnnnnnnnnnnnnnnnnnnnnnnnnnnnnnnnnnnnnnnnnnnnnnnnnnnnnnnnnnnnnnnnnnnnnnnnnnnnnnnnnnnnnnnnnnnnnnnnnnnnnnnnnnnnnnnnnnnnnnnnnnnnnnnnnnnnnnnnnnnnnnnnnnnnnnnnnnnnnnnnnnnnnnnnnnnnnnnnnnnnnnnnnnnnnnnnnnnnnnnnnnnnnnnnnnnnnnnnnnnnnnnnnnnnnnnnnnnnnnnnnnnnnnnnnnnnnnnnnnnnnnnnnnnnnnnnnnnnnnnnnnnnnnnnnnnnnnnnnnnnnnnnnnnnnnnnnnnnnnnnnnnnnnnnnnnnnnnnnnnnnnnnnnnnnnnnnnnnnnnnnnnnnnnnnnnnnnnnnnnnnnnnnnnnnnnnnnnnnnnnnnnnnnnnnnnnnnnnnnnnnnnnnnnnnnnnnnnnnnnnnnnnnnnnnnnnnnnnnnnnnnnnnnnnnnnnnnnnnnnnnnnnnnnnnnnnnnnnnnnnnnnnnnnnnnnnnnnnnnnnnnnnnnnnnnnnnnnnnnnnnnnnnnnnnnnnnnnnnnnnnnnnnnnnnnnnnnnnnnnnnnnnnnnnnnnnnnnnnnnnnnnnnnnnnnnnnnnnnnnnnnnnnnnnnnnnnnnnnnnnnnnnnnnnnnnnnnnnnnnnnnnnnnnnnnnnnnnnnnnnnnnnnnnnnnnnnnnnnnnnnnnnnnnnnnnnnnnnnnnnnnnnnnnnnnnnnnnnnnnnnnnnnnnnnnnnnnnnnnnnnnnnnnnnnnnnnnnnnnnnnnnnnnnnnnnnnnnnnnnnnnnnnnnnnnnnnnnnnnnnnnnnnnnnnnnnnnnnnnnnnnnnnnnnnnnnnnnnnnnnnnnnnnnnnnnnnnnnnnnnnnnnnnnnnnnnnnnnnnnnnnnnnnnnnnnnnnnnnnnnnnnnnnnnnnnnnnnnnnnnnnnnnnnnnnnnnnnnnnnnnnnnnnnnnnnnnnnnnnnnnnnnnnnnnnnnnnnnnnnnnnnnnnnnnnnnnnnnnnnnnnnnnnnnnnnnnnnnnnnnnnnnnnnnnnnnnnnnnnnnnnnnnnnnnnnnnnnnnnnnnnnnnnnnnnnnnnnnnnnnnnnnnnnnnnnnnnnnnnnnnnnnnnnnnnnnnnnnnnnnnnnnnnnnnnnnnnnnnnnnnnnnnnnnnnnnnnnnnnnnnnnnnnnnnnnnnnnnnnnnnnnnnnnnnnnnnnnnnnnnnnnnnnnnnnnnnnnnnnnnnnnnnnnnnnnnnnnnnnnnnnnnnnnnnnnnnnnnnnnnnnnnnnnnnnnnnnnnnnnnnnnnnnnnnnnnnnnnnnnnnnnnnnnnnnnnnnnnnnnnnnnnnnnnnnnnnnnnnnnnnnnnnnnnnnnnnnnnnnnnnnnnnnnnnnnnnnnnnnnnnnnnnnnnnnnnnnnnnnnnnnnnnnnnnnnnnnnnnnnnnnnnnnnnnnnnnnnnnnnnnnnnnnnnnnnnnnnnnnnnnnnnnnnnnnnnnnnnnnnnnnnnnnnnnnnnnnnnnnnnnnnnnnnnnnnnnnnnnnnnnnnnnnnnnnnnnnnnnnnnnnnnnnnnnnnnnnnnnnnnnnnnnnnnnnnnnnnnnnnnnnnnnnnnnnnnnnnnnnnnnnnnnnnnnnnnnnnnnnnnnnnnnnnnnnnnnnnnnnnnnnnnnnnnnnnnnnnnnnnnnnnnnnnnnnnnnnnnnnnnnnnnnnnnnnnnnnnnnnnnnnnnnnnnnnnnnnnnnnnnnnnnnnnnnnnnnnnnnnnnnnnnnnnnnnnnnnnnnnnnnnnnnnnnnnnnnnnnnnnnnnnnnnnnnnnnnnnnnnnnnnnnnnnnnnnnnnnnnnnnnnnnnnnnnnnnnnnnnnnnnnnnnnnnnnnnnnnnnnnnnnnnnnnnnnnnnnnnnnnnnnnnnnnnnnnnnnnnnnnnnnnnnnnnnnnnnnnnnnnnnnnnnnnnnnnnnnnnnnnnnnnnnnnnnnnnnnnnnnnnnnnnnnnnnnnnnnnnnnnnnnnnnnnnnnnnnnnnnnnnnnnnnnnnnnnnnnnnnnnnnnnnnnnnnnnnnnnnnnnnnnnnnnnnnnnnnnnnnnnnnnnnnnnnnnnnnnnnnnnnnnnnnnnnnnnnnnnnnnnnnnnnnnnnnnnnnnnnnnnnnnnnnnnnnnnnnnnnnnnnnnnnnnnnnnnnnnnnnnnnnnnnnnnnnnnnnnnnnnnnnnnnnnnnnnnnnnnnnnnnnnnnnnnnnnnnnnnnnnnnnnnnnnnnnnnnnnnnnnnnnnnnnnnnnnnnnnnnnnnnnnnnnnnnnnnnnnnnnnnnnnnnnnnnnnnnnnnnnnnnnnnnnnnnnnnnnnnnnnnnnnnnnnnnnnnnnnnnnnnnnnnnnnnnnnnnnnnnnnnnnnnnnnnnnnnnnnnnnnnnnnnnnnnnnnnnnnnnnnnnnnnnnnnnnnnnnnnnnnnnnnnnnnnnnnnnnnnnnnnnnnnnnnnnnnnnnnnnnnnnnnnnnnnnnnnnnnnnnnnnnnnnnnnnnnnnnnnnnnnnnnnnnnnnnnnnnnnnnnnnnnnnnnnnnnnnnnnnnnnnnnnnnnnnnnnnnnnnnnnnnnnnnnnnnnnnnnnnnnnnnnnnnnnnnnnnnnnnnnnnnnnnnnnnnnnnnnnnnnnnnnnnnnnnnnnnnnnnnnnnnnnnnnnnnnnnnnnnnnnnnnnnnnnnnnnnnnnnnnnnnnnnnnnnnnnnnnnnnnnnnnnnnnnnnnnnnnnnnnnnnnnnnnnnnnnnnnnnnnnnnnnnnnnnnnnnnnnnnnnnnnnnnnnnnnnnnnnnnnnnnnnnnnnnnnnnnnnnnnnnnnnnnnnnnnnnnnnnnnnnnnnnnnnnnnnnnnnnnnnnnnnnnnnnnnnnnnnnnnnnnnnnnnnnnnnnnnnnnnnnnnnnnnnnnnnnnnnnnnnnnnnnnnnnnnnnnnnnnnnnnnnnnnnnnnnnnnnnnnnnnnnnnnnnnnnnnnnnnnnnnnnnnnnnnnnnnnnnnnnnnnnnnnnnnnnnnnnnnnnnnnnnnnnnnnnnnnnnnnnnnnnnnnnnnnnnnnnnnnnnnnnnnnnnnnnnnnnnnnnnnnnnnnnnnnnnnnnnnnnnnnnnnnnnnnnnnnnnnnnnnnnnnnnnnnnnnnnnnnnnnnnnnnnnnnnnnnnnnnnnnnnnnnnnnnnnnnnnnnnnnnnnnnnnnnnnnnnnnnnnnnnnnnnnnnnnnnnnnnnnnnnnnnnnnnnnnnnnnnnnnnnnnnnnnnnnnnnnnnnnnnnnnnnnnnnnnnnnnnnnnnnnnnnnnnnnnnnnnnnnnnnnnnnnnnnnnnnnnnnnnnnnnnnnnnnnnnnnnnnnnnnnnnnnnnnnnnnnnnnnnnnnnnnnnnnnnnnnnnnnnnnnnnnnnnnnnnnnnnnnnnnnnnnnnnnnnnnnnnnnnnnnnnnnnnnnnnnnnnnnnnnnnnnnnnnnnnnnnnnnnnnnnnnnnnnnnnnnnnnnnnnnnnnnnnnnnnnnnnnnnnnnnnnnnnnnnnnnnnnnnnnnnnnnnnnnnnnnnnnnnnnnnnnnnnnnnnnnnnnnnnnnnnnnnnnnnnnnnnnnnnnnnnnnnnnnnnnnnnnnnnnnnnnnnnnnnnnnnnnnnnnnnnnnnnnnnnnnnnnnnnnnnnnnnnnnnnnnnnnnnnnnnnnnnnnnnnnnnnnnnnnnnnnnnnnnnnnnnnnnnnnnnnnnnnnnnnnnnnnnnnnnnnnnnnnnnnnnnnnnnnnnnnnnnnnnnnnnnnnnnnnnnnnnnnnnnnnnnnnnnnnnnnnnnnnnnnnnnnnnnnnnnnnnnnnnnnnnnnnnnnnnnnnnnnnnnnnnnnnnnnnnnnnnnnnnnnnnnnnnnnnnnnnnnnnnnnnnnnnnnnnnnnnnnnnnnnnnnnnnnnnnnnnnnnnnnnnnnnnnnnnnnnnnnnnnnnnnnnnnnnnnnnnnnnnnnnnnnnnnnnnnnnnnnnnnnnnnnnnnnnnnnnnnnnnnnnnnnnnnnnnnnnnnnnnnnnnnnnnnnnnnnnnnnnnnnnnnnnnnnnnnnnnnnnnnnnnnnnnnnnnnnnnnnnnnnnnnnnnnnnnnnnnnnnnnnnnnnnnnnnnnnnnnnnnnnnnnnnnnnnnnnnnnnnnnnnnnnnnnnnnnnnnnnnnnnnnnnnnnnnnnnnnnnnnnnnnnnnnnnnnnnnnnnnnnnnnnnnnnnnnnnnnnnnnnnnnnnnnnnnnnnnnnnnnnnnnnnnnnnnnnnnnnnnnnnnnnnnnnnnnnnnnnnnnnnnnnnnnnnnnnnnnnnnnnnnnnnnnnnnnnnnnnnnnnnnnnnnnnnnnnnnnnnnnnnnnnnnnnnnnnnnnnnnnnnnnnnnnnnnnnnnnnnnnnnnnnnnnnnnnnnnnnnnnnnnnnnnnnnnnnnnnnnnnnnnnnnnnnnnnnnnnnnnnnnnnnnnnnnnnnnnnnnnnnnnnnnnnnnnnnnnnnnnnnnnnnnnnnnnnnnnnnnnnnnnnnnnnnnnnnnnnnnnnnnnnnnnnnnnnnnnnnnnnnnnnnnnnnnnnnnnnnnnnnnnnnnnnnnnnnnnnnnnnnnnnnnnnnnnnnnnnnnnnnnnnnnnnnnnnnnnnnnnnnnnnnnnnnnnnnnnnnnnnnnnnnnnnnnnnnnnnnnnnnnnnnnnnnnnnnnnnnnnnnnnnnnnnnnnnnnnnnnnnnnnnnnnnnnnnnnnnnnnnnnnnnnnnnnnnnnnnnnnnnnnnnnnnnnnnnnnnnnnnnnnnnnnnnnnnnnnnnnnnnnnnnnnnnnnnnnnnnnnnnnnnnnnnnnnnnnnnnnnnnnnnnnnnnnnnnnnnnnnnnnnnnnnnnnnnnnnnnnnnnnnnnnnnnnnnnnnnnnnnnnnnnnnnnnnnnnnnnnnnnnnnnnnnnnnnnnnnnnnnnnnnnnnnnnnnnnnnnnnnnnnnnnnnnnnnnnnnnnnnnnnnnnnnnnnnnnnnnnnnnnnnnnnnnnnnnnnnnnnnnnnnnnnnnnnnnnnnnnnnnnnnnnnnnnnnnnnnnnnnnnnnnnnnnnnnnnnnnnnnnnnnnnnnnnnnnnnnnnnnnnnnnnnnnnnnnnnnnnnnnnnnnnnnnnnnnnnnnnnnnnnnnnnnnnnnnnnnnnnnnnnnnnnnnnnnnnnnnnnnnnnnnnnnnnnnnnnnnnnnnnnnnnnnnnnnnnnnnnnnnnnnnnnnnnnnnnnnnnnnnnnnnnnnnnnnnnnnnnnnnnnnnnnnnnnnnnnnnnnnnnnnnnnnnnnnnnnnnnnnnnnnnnnnnnnnnnnnnnnnnnnnnnnnnnnnnnnnnnnnnnnnnnnnnnnnnnnnnnnnnnnnnnnnnnnnnnnnnnnnnnnnnnnnnnnnnnnnnnnnnnnnnnnnnnnnnnnnnnnnnnnnnnnnnnnnnnnnnnnnnnnnnnnnnnnnnnnnnnnnnnnnnnnnnnnnnnnnnnnnnnnnnnnnnnnnnnnnnnnnnnnnnnnnnnnnnnnnnnnnnnnnnnnnnnnnnnnnnnnnnnnnnnnnnnnnnnnnnnnnnnnnnnnnnnnnnnnnnnnnnnnnnnnnnnnnnnnnnnnnnnnnnnnnnnnnnnnnnnnnnnnnnnnnnnnnnnnnnnnnnnnnnnnnnnnnnnnnnnnnnnnnnnnnnnnnnnnnnnnnnnnnnnnnnnnnnnnnnnnnnnnnnnnnnnnnnnnnnnnnnnnnnnnnnnnnnnnnnnnnnnnnnnnnnnnnnnnnnnnnnnnnnnnnnnnnnnnnnnnnnnnnnnnnnnnnnnnnnnnnnnnnnnnnnnnnnnnnnnnnnnnnnnnnnnnnnnnnnnnnnnnnnnnnnnnnnnnnnnnnnnnnnnnnnnnnnnnnnnnnnnnnnnnnnnnnnnnnnnnnnnnnnnnnnnnnnnnnnnnnnnnnnnnnnnnnnnnnnnnnnnnnnnnnnnnnnnnnnnnnnnnnnnnnnnnnnnnnnnnnnnnnnnnnnnnnnnnnnnnnnnnnnnnnnnnnnnnnnnnnnnnnnnnnnnnnnnnnnnnnnnnnnnnnnnnnnnnnnnnnnnnnnnnnnnnnnnnnnnnnnnnnnnnnnnnnnnnnnnnnnnnnnnnnnnnnnnnnnnnnnnnnnnnnnnnnnnnnnnnnnnnnnnnnnnnnnnnnnnnnnnnnnnnnnnnnnnnnnnnnnnnnnnnnnnnnnnnnnnnnnnnnnnnnnnnnnnnnnnnnnnnnnnnnnnnnnnnnnnnnnnnnnnnnnnnnnnnnnnnnnnnnnnnnnnnnnnnnnnnnnnnnnnnnnnnnnnnnnnnnnnnnnnnnnnnnnnnnnnnnnnnnnnnnnnnnnnnnnnnnnnnnnnnnnnnnnnnnnnnnnnnnnnnnnnnnnnnnnnnnnnnnnnnnnnnnnnnnnnnnnnnnnnnnnnnnnnnnnnnnnnnnnnnnnnnnnnnnnnnnnnnnnnnnnnnnnnnnnnnnnnnnnnnnnnnnnnnnnnnnnnnnnnnnnnnnnnnnnnnnnnnnnnnnnnnnnnnnnnnnnnnnnnnnnnnnnnnnnnnnnnnnnnnnnnnnnnnnnnnnnnnnnnnnnnnnnnnnnnnnnnnnnnnnnnnnnnnnnnnnnnnnnnnnnnnnnnnnnnnnnnnnnnnnnnnnnnnnnnnnnnnnnnnnnnnnnnnnnnnnnnnnnnnnnnnnnnnnnnnnnnnnnnnnnnnnnnnnnnnnnnnnnnnnnnnnnnnnnnnnnnnnnnnnnnnnnnnnnnnnnnnnnnnnnnnnnnnnnnnnnnnnnnnnnnnnnnnnnnnnnnnnnnnnnnnnnnnnnnnnnnnnnnnnnnnnnnnnnnnnnnnnnnnnnnnnnnnnnnnnnnnnnnnnnnnnnnnnnnnnnnnnnnnnnnnnnnnnnnnnnnnnnnnnnnnnnnnnnnnnnnnnnnnnnnnnnnnnnnnnnnnnnnnnnnnnnnnnnnnnnnnnnnnnnnnnnnnnnnnnnnnnnnnnnnnnnnnnnnnnnnnnnnnnnnnnnnnnnnnnnnnnnnnnnnnnnnnnnnnnnnnnnnnnnnnnnnnnnnnnnnnnnnnnnnnnnnnnnnnnnnnnnnnnnnnnnnnnnnnnnnnnnnnnnnnnnnnnnnnnnnnnnnnnnnnnnnnnnnnnnnnnnnnnnnnnnnnnnnnnnnnnnnnnnnnnnnnnnnnnnnnnnnnnnnnnnnnnnnnnnnnnnnnnnnnnnnnnnnnnnnnnnnnnnnnnnnnnnnnnnnnnnnnnnnnnnnnnnnnnnnnnnnnnnnnnnnnnnnnnnnnnnnnnnnnnnnnnnnnnnnnnnnnnnnnnnnnnnnnnnnnnnnnnnnnnnnnnnnnnnnnnnnnnnnnnnnnnnnnnnnnnnnnnnnnnnnnnnnnnnnnnnnnnnnnnnnnnnnnnnnnnnnnnnnnnnnnnnnnnnnnnnnnnnnnnnnnnnnnnnnnnnnnnnnnnnnnnnnnnnnnnnnnnnnnnnnnnnnnnnnnnnnnnnnnnnnnnnnnnnnnnnnnnnnnnnnnnnnnnnnnnnnnnnnnnnnnnnnnnnnnnnnnnnnnnnnnnnnnnnnnnnnnnnnnnnnnnnnnnnnnnnnnnnnnnnnnnnnnnnnnnnnnnnnnnnnnnnnnnnnnnnnnnnnnnnnnnnnnnnnnnnnnnnnnnnnnnnnnnnnnnnnnnnnnnnnnnnnnnnnnnnnnnnnnnnnnnnnnnnnnnnnnnnnnnnnnnnnnnnnnnnnnnnnnnnnnnnnnnnnnnnnnnnnnnnnnnnnnnnnnnnnnnnnnnnnnnnnnnnnnnnnnnnnnnnnnnnnnnnnnnnnnnnnnnnnnnnnnnnnnnnnnnnnnnnnnnnnnnnnnnnnnnnnnnnnnnnnnnnnnnnnnnnnnnnnnnnnnnnnnnnnnnnnnnnnnnnnnnnnnnnnnnnnnnnnnnnnnnnnnnnnnnnnnnnnnnnnnnnnnnnnnnnnnnnnnnnnnnnnnnnnnnnnnnnnnnnnnnnnnnnnnnnnnnnnnnnnnnnnnnnnnnnnnnnnnnnnnnnnnnnnnnnnnnnnnnnnnnnnnnnnnnnnnnnnnnnnnnnnnnnnnnnnnnnnnnnnnnnnnnnnnnnnnnnnnnnnnnnnnnnnnnnnnnnnnnnnnnnnnnnnnnnnnnnnnnnnnnnnnnnnnnnnnnnnnnnnnnnnnnnnnnnnnnnnnnnnnnnnnnnnnnnnnnnnnnnnnnnnnnnnnnnnnnnnnnnnnnnnnnnnnnnnnnnnnnnnnnnnnnnnnnnnnnnnnnnnnnnnnnnnnnnnnnnnnnnnnnnnnnnnnnnnnnnnnnnnnnnnnnnnnnnnnnnnnnnnnnnnnnnnnnnnnnnnnnnnnnnnnnnnnnnnnnnnnnnnnnnnnnnnnnnnnnnnnnnnnnnnnnnnnnnnnnnnnnnnnnnnnnnnnnnnnnnnnnnnnnnnnnnnnnnnnnnnnnnnnnnnnnnnnnnnnnnnnnnnnnnnnnnnnnnnnnnnnnnnnnnnnnnnnnnnnnnnnnnnnnnnnnnnnnnnnnnnnnnnnnnnnnnnnnnnnnnnnnnnnnnnnnnnnnnnnnnnnnnnnnnnnnnnnnnnnnnnnnnnnnnnnnnnnnnnnnnnnnnnnnnnnnnnnnnnnnnnnnnnnnnnnnnnnnnnnnnnnnnnnnnnnnnnnnnnnnnnnnnnnnnnnnnnnnnnnnnnnnnnnnnnnnnnnnnnnnnnnnnnnnnnnnnnnnnnnnnnnnnnnnnnnnnnnnnnnnnnnnnnnnnnnnnnnnnnnnnnnnnnnnnnnnnnnnnnnnnnnnnnnnnnnnnnnnnnnnnnnnnnnnnnnnnnnnnnnnnnnnnnnnnnnnnnnnnnnnnnnnnnnnnnnnnnnnnnnnnnnnnnnnnnnnnnnnnnnnnnnnnnnnnnnnnnnnnnnnnnnnnnnnnnnnnnnnnnnnnnnnnnnnnnnnnnnnnnnnnnnnnnnnnnnnnnnnnnnnnnnnnnnnnnnnnnnnnnnnnnnnnnnnnnnnnnnnnnnnnnnnnnnnnnnnnnnnnnnnnnnnnnnnnnnnnnnnnnnnnnnnnnnnnnnnnnnnnnnnnnnnnnnnnnnnnnnnnnnnnnnnnnnnnnnnnnnnnnnnnnnnnnnnnnnnnnnnnnnnnnnnnnnnnnnnnnnnnnnnnnnnnnnnnnnnnnnnnnnnnnnnnnnnnnnnnnnnnnnnnnnnnnnnnnnnnnnnnnnnnnnnnnnnnnnnnnnnnnnnnnnnnnnnnnnnnnnnnnnnnnnnnnnnnnnnnnnnnnnnnnnnnnnnnnnnnnnnnnnnnnnnnnnnnnnnnnnnnnnnnnnnnnnnnnnnnnnnnnnnnnnnnnnnnnnnnnnnnnnnnnnnnnnnnnnnnnnnnnnnnnnnnnnnnnnnnnnnnnnnnnnnnnnnnnnnnnnnnnnnnnnnnnnnnnnnnnnnnnnnnnnnnnnnnnnnnnnnnnnnnnnnnnnnnnnnnnnnnnnnnnnnnnnnnnnnnnnnnnnnnnnnnnnnnnnnnnnnnnnnnnnnnnnnnnnnnnnnnnnnnnnnnnnnnnnnnnnnnnnnnnnnnnnnnnnnnnnnnnnnnnnnnnnnnnnnnnnnnnnnnnnnnnnnnnnnnnnnnnnnnnnnnnnnnnnnnnnnnnnnnnnnnnnnnnnnnnnnnnnnnnnnnnnnnnnnnnnnnnnnnnnnnnnnnnnnnnnnnnnnnnnnnnnnnnnnnnnnnnnnnnnnnnnnnnnnnnnnnnnnnnnnnnnnnnnnnnnnnnnnnnnnnnnnnnnnnnnnnnnnnnnnnnnnnnnnnnnnnnnnnnnnnnnnnnnnnnnnnnnnnnnnnnnnnnnnnnnnnnnnnnnnnnnnnnnnnnnnnnnnnnnnnnnnnnnnnnnnnnnnnnnnnnnnnnnnnnnnnnnnnnnnnnnnnnnnnnnnnnnnnnnnnnnnnnnnnnnnnnnnnnnnnnnnnnnnnnnnnnnnnnnnnnnnnnnnnnnnnnnnnnnnnnnnnnnnnnnnnnnnnnnnnnnnnnnnnnnnnnnnnnnnnnnnnnnnnnnnnnnnnnnnnnnnnnnnnnnnnnnnnnnnnnnnnnnnnnnnnnnnnnnnnnnnnnnnnnnnnnnnnnnnnnnnnnnnnnnnnnnnnnnnnnnnnnnnnnnnnnnnnnnnnnnnnnnnnnnnnnnnnnnnnnnnnnnnnnnnnnnnnnnnnnnnnnnnnnnnnnnnnnnnnnnnnnnnnnnnnnnnnnnnnnnnnnnnnnnnnnnnnnnnnnnnnnnnnnnnnnnnnnnnnnnnnnnnnnnnnnnnnnnnnnnnnnnnnnnnnnnnnnnnnnnnnnnnnnnnnnnnnnnnnnnnnnnnnnnnnnnnnnnnnnnnnnnnnnnnnnnnnnnnnnnnnnnnnnnnnnnnnnnnnnnnnnnnnnnnnnnnnnnnnnnnnnnnnnnnnnnnnnnnnnnnnnnnnnnnnnnnnnnnnnnnnnnnnnnnnnnnnnnnnnnnnnnnnnnnnnnnnnnnnnnnnnnnnnnnnnnnnnnnnnnnnnnnnnnnnnnnnnnnnnnnnnnnnnnnnnnnnnnnnnnnnnnnnnnnnnnnnnnnnnnnnnnnnnnnnnnnnnnnnnnnnnnnnnnnnnnnnnnnnnnnnnnnnnnnnnnnnnnnnnnnnnnnnnnnnnnnnnnnnnnnnnnnnnnnnnnnnnnnnnnnnnnnnnnnnnnnnnnnnnnnnnnnnnnnnnnnnnnnnnnnnnnnnnnnnnnnnnnnnnnnnnnnnnnnnnnnnnnnnnnnnnnnnnnnnnnnnnnnnnnnnnnnnnnnnnnnnnnnnnnnnnnnnnnnnnnnnnnnnnnnnnnnnnnnnnnnnnnnnnnnnnnnnnnnnnnnnnnnnnnnnnnnnnnnnnnnnnnnnnnnnnnnnnnnnnnnnnnnnnnnnnnnnnnnnnnnnnnnnnnnnnnnnnnnnnnnnnnnnnnnnnnnnnnnnnnnnnnnnnnnnnnnnnnnnnnnnnnnnnnnnnnnnnnnnnnnnnnnnnnnnnnnnnnnnnnnnnnnnnnnnnnnnnnnnnnnnnnnnnnnnnnnnnnnnnnnnnnnnnnnnnnnnnnnnnnnnnnnnnnnnnnnnnnnnnnnnnnnnnnnnnnnnnnnnnnnnnnnnnnnnnnnnnnnnnnnnnnnnnnnnnnnnnnnnnnnnnnnnnnnnnnnnnnnnnnnnnnnnnnnnnnnnnnnnnnnnnnnnnnnnnnnnnnnnnnnnnnnnnnnnnnnnnnnnnnnnnnnnnnnnnnnnnnnnnnnnnnnnnnnnnnnnnnnnnnnnnnnnnnnnnnnnnnnnnnnnnnnnnnnnnnnnnnnnnnnnnnnnnnnnnnnnnnnnnnnnnnnnnnnnnnnnnnnnnnnnnnnnnnnnnnnnnnnnnnnnnnnnnnnnnnnnnnnnnnnnnnnnnnnnnnnnnnnnnnnnnnnnnnnnnnnnnnnnnnnnnnnnnnnnnnnnnnnnnnnnnnnnnnnnnnnnnnnnnnnnnnnnnnnnnnnnnnnnnnnnnnnnnnnnnnnnnnnnnnnnnnnnnnnnnnnnnnnnnnnnnnnnnnnnnnnnnnnnnnnnnnnnnnnnnnnnnnnnnnnnnnnnnnnnnnnnnnnnnnnnnnnnnnnnnnnnnnnnnnnnnnnnnnnnnnnnnnnnnnnnnnnnnnnnnnnnnnnnnnnnnnnnnnnnnnnnnnnnnnnnnnnnnnnnnnnnnnnnnnnnnnnnnnnnnnnnnnnnnnnnnnnnnnnnnnnnnnnnnnnnnnnnnnnnnnnnnnnnnnnnnnnnnnnnnnnnnnnnnnnnnnnnnnnnnnnnnnnnnnnnnnnnnnnnnnnnnnnnnnnnnnnnnnnnnnnnnnnnnnnnnnnnnnnnnnnnnnnnnnnnnnnnnnnnnnnnnnnnnnnnnnnnnnnnnnnnnnnnnnnnnnnnnnnnnnnnnnnnnnnnnnnnnnnnnnnnnnnnnnnnnnnnnnnnnnnnnnnnnnnnnnnnnnnnnnnnnnnnnnnnnnnnnnnnnnnnnnnnnnnnnnnnnnnnnnnnnnnnnnnnnnnnnnnnnnnnnnnnnnnnnnnnnnnnnnnnnnnnnnnnnnnnnnnnnnnnnnnnnnnnnnnnnnnnnnnnnnnnnnnnnnnnnnnnnnnnnnnnnnnnnnnnnnnnnnnnnnnnnnnnnnnnnnnnnnnnnnnnnnnnnnnnnnnnnnnnnnnnnnnnnnnnnnnnnnnnnnnnnnnnnnnnnnnnnnnnnnnnnnnnnnnnnnnnnnnnnnnnnnnnnnnnnnnnnnnnnnnnnnnnnnnnnnnnnnnnnnnnnnnnnnnnnnnnnnnnnnnnnnnnnnnnnnnnnnnnnnnnnnnnnnnnnnnnnnnnnnnnnnnnnnnnnnnnnnnnnnnnnnnnnnnnnnnnnnnnnnnnnnnnnnnnnnnnnnnnnnnnnnnnnnnnnnnnnnnnnnnnnnnnnnnnnnnnnnnnnnnnnnnnnnnnnnnnnnnnnnnnnnnnnnnnnnnnnnnnnnnnnnnnnnnnnnnnnnnnnnnnnnnnnnnnnnnnnnnnnnnnnnnnnnnnnnnnnnnnnnnnnnnnnnnnnnnnnnnnnnnnnnnnnnnnnnnnnnnnnnnnnnnnnnnnnnnnnnnnnnnnnnnnnnnnnnnnnnnnnnnnnnnnnnnnnnnnnnnnnnnnnnnnnnnnnnnnnnnnnnnnnnnnnnnnnnnnnnnnnnnnnnnnnnnnnnnnnnnnnnnnnnnnnnnnnnnnnnnnnnnnnnnnnnnnnnnnnnnnnnnnnnnnnnnnnnnnnnnnnnnnnnnnnnnnnnnnnnnnnnnnnnnnnnnnnnnnnnnnnnnnnnnnnnnnnnnnnnnnnnnnnnnnnnnnnnnnnnnnnnnnnnnnnnnnnnnnnnnnnnnnnnnnnnnnnnnnnnnnnnnnnnnnnnnnnnnnnnnnnnnnnnnnnnnnnnnnnnnnnnnnnnnnnnnnnnnnnnnnnnnnnnnnnnnnnnnnnnnnnnnnnnnnnnnnnnnnnnnnnnnnnnnnnnnnnnnnnnnnnnnnnnnnnnnnnnnnnnnnnnnnnnnnnnnnnnnnnnnnnnnnnnnnnnnnnnnnnnnnnnnnnnnnnnnnnnnnnnnnnnnnnnnnnnnnnnnnnnnnnnnnnnnnnnnnnnnnnnnnnnnnnnnnnnnnnnnnnnnnnnnnnnnnnnnnnnnnnnnnnnnnnnnnnnnnnnnnnnnnnnnnnnnnnnnnnnnnnnnnnnnnnnnnnnnnnnnnnnnnnnnnnnnnnnnnnnnnnnnnnnnnnnnnnnnnnnnnnnnnnnnnnnnnnnnnnnnnnnnnnnnnnnnnnnnnnnnnnnnnnnnnnnnnnnnnnnnnnnnnnnnnnnnnnnnnnnnnnnnnnnnnnnnnnnnnnnnnnnnnnnnnnnnnnnnnnnnnnnnnnnnnnnnnnnnnnnnnnnnnnnnnnnnnnnnnnnnnnnnnnnnnnnnnnnnnnnnnnnnnnnnnnnnnnnnnnnnnnnnnnnnnnnnnnnnnnnnnnnnnnnnnnnnnnnnnnnnnnnnnnnnnnnnnnnnnnnnnnnnnnnnnnnnnnnnnnnnnnnnnnnnnnnnnnnnnnnnnnnnnnnnnnnnnnnnnnnnnnnnnnnnnnnnnnnnnnnnnnnnnnnnnnnnnnnnnnnnnnnnnnnnnnnnnnnnnnnnnnnnnnnnnnnnnnnnnnnnnnnnnnnnnnnnnnnnnnnnnnnnnnnnnnnnnnnnnnnnnnnnnnnnnnnnnnnnnnnnnnnnnnnnnnnnnnnnnnnnnnnnnnnnnnnnnnnnnnnnnnnnnnnnnnnnnnnnnnnnnnnnnnnnnnnnnnnnnnnnnnnnnnnnnnnnnnnnnnnnnnnnnnnnnnnnnnnnnnnnnnnnnnnnnnnnnnnnnnnnnnnnnnnnnnnnnnnnnnnnnnnnnnnnnnnnnnnnnnnnnnnnnnnnnnnnnnnnnnnnnnnnnnnnnnnnnnnnnnnnnnnnnnnnnnnnnnnnnnnnnnnnnnnnnnnnnnnnnnnnnnnnnnnnnnnnnnnnnnnnnnnnnnnnnnnnnnnnnnnnnnnnnnnnnnnnnnnnnnnnnnnnnnnnnnnnnnnnnnnnnnnnnnnnnnnnnnnnnnnnnnnnnnnnnnnnnnnnnnnnnnnnnnnnnnnnnnnnnnnnnnnnnnnnnnnnnnnnnnnnnnnnnnnnnnnnnnnnnnnnnnnnnnnnnnnnnnnnnnnnnnnnnnnnnnnnnnnnnnnnnnnnnnnnnnnnnnnnnnnnnnnnnnnnnnnnnnnnnnnnnnnnnnnnnnnnnnnnnnnnnnnnnnnnnnnnnnnnnnnnnnnnnnnnnnnnnnnnnnnnnnnnnnnnnnnnnnnnnnnnnnnnnnnnnnnnnnnnnnnnnnnnnnnnnnnnnnnnnnnnnnnnnnnnnnnnnnnnnnnnnnnnnnnnnnnnnnnnnnnnnnnnnnnnnnnnnnnnnnnnnnnnnnnnnnnnnnnnnnnnnnnnnnnnnnnnnnnnnnnnnnnnnnnnnnnnnnnnnnnnnnnnnnnnnnnnnnnnnnnnnnnnnnnnnnnnnnnnnnnnnnnnnnnnnnnnnnnnnnnnnnnnnnnnnnnnnnnnnnnnnnnnnnnnnnnnnnnnnnnnnnnnnnnnnnnnnnnnnnnnnnnnnnnnnnnnnnnnnnnnnnnnnnnnnnnnnnnnnnnnnnnnnnnnnnnnnnnnnnnnnnnnnnnnnnnnnnnnnnnnnnnnnnnnnnnnnnnnnnnnnnnnnnnnnnnnnnnnnnnnnnnnnnnnnnnnnnnnnnnnnnnnnnnnnnnnnnnnnnnnnnnnnnnnnnnnnnnnnnnnnnnnnnnnnnnnnnnnnnnnnnnnnnnnnnnnnnnnnnnnnnnnnnnnnnnnnnnnnnnnnnnnnnnnnnnnnnnnnnnnnnnnnnnnnnnnnnnnnnnnnnnnnnnnnnnnnnnnnnnnnnnnnnnnnnnnnnnnnnnnnnnnnnnnnnnnnnnnnnnnnnnnnnnnnnnnnnnnnnnnnnnnnnnnnnnnnnnnnnnnnnnnnnnnnnnnnnnnnnnnnnnnnnnnnnnnnnnnnnnnnnnnnnnnnnnnnnnnnnnnnnnnnnnnnnnnnnnnnnnnnnnnnnnnnnnnnnnnnnnnnnnnnnnnnnnnnnnnnnnnnnnnnnnnnnnnnnnnnnnnnnnnnnnnnnnnnnnnnnnnnnnnnnnnnnnnnnnnnnnnnnnnnnnnnnnnnnnnnnnnnnnnnnnnnnnnnnnnnnnnnnnnnnnnnnnnnnnnnnnnnnnnnnnnnnnnnnnnnnnnnnnnnnnnnnnnnnnnnnnnnnnnnnnnnnnnnnnnnnnnnnnnnnnnnnnnnnnnnnnnnnnnnnnnnnnnnnnnnnnnnnnnnnnnnnnnnnnnnnnnnnnnnnnnnnnnnnnnnnnnnnnnnnnnnnnnnnnnnnnnnnnnnnnnnnnnnnnnnnnnnnnnnnnnnnnnnnnnnnnnnnnnnnnnnnnnnnnnnnnnnnnnnnnnnnnnnnnnnnnnnnnnnnnnnnnnnnnnnnnnnnnnnnnnnnnnnnnnnnnnnnnnnnnnnnnnnnnnnnnnnnnnnnnnnnnnnnnnnnnnnnnnnnnnnnnnnnnnnnnnnnnnnnnnnnnnnnnnnnnnnnnnnnnnnnnnnnnnnnnnnnnnnnnnnnnnnnnnnnnnnnnnnnnnnnnnnnnnnnnnnnnnnnnnnnnnnnnnnnnnnnnnnnnnnnnnnnnnnnnnnnnnnnnnnnnnnnnnnnnnnnnnnnnnnnnnnnnnnnnnnnnnnnnnnnnnnnnnnnnnnnnnnnnnnnnnnnnnnnnnnnnnnnnnnnnnnnnnnnnnnnnnnnnnnnnnnnnnnnnnnnnnnnnnnnnnnnnnnnnnnnnnnnnnnnnnnnnnnnnnnnnnnnnnnnnnnnnnnnnnnnnnnnnnnnnnnnnnnnnnnnnnnnnnnnnnnnnnnnnnnnnnnnnnnnnnnnnnnnnnnnnnnnnnnnnnnnnnnnnnnnnnnnnnnnnnnnnnnnnnnnnnnnnnnnnnnnnnnnnnnnnnnnnnnnnnnnnnnnnnnnnnnnnnnnnnnnnnnnnnnnnnnnnnnnnnnnnnnnnnnnnnnnnnnnnnnnnnnnnnnnnnnnnnnnnnnnnnnnnnnnnnnnnnnnnnnnnnnnnnnnnnnnnnnnnnnnnnnnnnnnnnnnnnnnnnnnnnnnnnnnnnnnnnnnnnnnnnnnnnnnnnnnnnnnnnnnnnnnnnnnnnnnnnnnnnnnnnnnnnnnnnnnnnnnnnnnnnnnnnnnnnnnnnnnnnnnnnnnnnnnnnnnnnnnnnnnnnnnnnnnnnnnnnnnnnnnnnnnnnnnnnnnnnnnnnnnnnnnnnnnnnnnnnnnnnnnnnnnnnnnnnnnnnnnnnnnnnnnnnnnnnnnnnnnnnnnnnnnnnnnnnnnnnnnnnnnnnnnnnnnnnnnnnnnnnnnnnnnnnnnnnnnnnnnnnnnnnnnnnnnnnnnnnnnnnnnnnnnnnnnnnnnnnnnnnnnnnnnnnnnnnnnnnnnnnnnnnnnnnnnnnnnnnnnnnnnnnnnnnnnnnnnnnnnnnnnnnnnnnnnnnnnnnnnnnnnnnnnnnnnnnnnnnnnnnnnnnnnnnnnnnnnnnnnnnnnnnnnnnnnnnnnnnnnnnnnnnnnnnnnnnnnnnnnnnnnnnnnnnnnnnnnnnnnnnnnnnnnnnnnnnnnnnnnnnnnnnnnnnnnnnnnnnnnnnnnnnnnnnnnnnnnnnnnnnnnnnnnnnnnnnnnnnnnnnnnnnnnnnnnnnnnnnnnnnnnnnnnnnnnnnnnnnnnnnnnnnnnnnnnnnnnnnnnnnnnnnnnnnnnnnnnnnnnnnnnnnnnnnnnnnnnnnnnnnnnnnnnnnnnnnnnnnnnnnnnnnnnnnnnnnnnnnnnnnnnnnnnnnnnnnnnnnnnnnnnnnnnnnnnnnnnnnnnnnnnnnnnnnnnnnnnnnnnnnnnnnnnnnnnnnnnnnnnnnnnnnnnnnnnnnnnnnnnnnnnnnnnnnnnnnnnnnnnnnnnnnnnnnnnnnnnnnnnnnnnnnnnnnnnnnnnnnnnnnnnnnnnnnnnnnnnnnnnnnnnnnnnnnnnnnnnnnnnnnnnnnnnnnnnnnnnnnnnnnnnnnnnnnnnnnnnnnnnnnnnnnnnnnnnnnnnnnnnnnnnnnnnnnnnnnnnnnnnnnnnnnnnnnnnnnnnnnnnnnnnnnnnnnnnnnnnnnnnnnnnnnnnnnnnnnnnnnnnnnnnnnnnnnnnnnnnnnnnnnnnnnnnnnnnnnnnnnnnnnnnnnnnnnnnnnnnnnnnnnnnnnnnnnnnnnnnnnnnnnnnnnnnnnnnnnnnnnnnnnnnnnnnnnnnnnnnnnnnnnnnnnnnnnnnnnnnnnnnnnnnnnnnnnnnnnnnnnnnnnnnnnnnnnnnnnnnnnnnnnnnnnnnnnnnnnnnnnnnnnnnnnnnnnnnnnnnnnnnnnnnnnnnnnnnnnnnnnnnnnnnnnnnnnnnnnnnnnnnnnnnnnnnnnnnnnnnnnnnnnnnnnnnnnnnnnnnnnnnnnnnnnnnnnnnnnnnnnnnnnnnnnnnnnnnnnnnnnnnnnnnnnnnnnnnnnnnnnnnnnnnnnnnnnnnnnnnnnnnnnnnnnnnnnnnnnnnnnnnnnnnnnnnnnnnnnnnnnnnnnnnnnnnnnnnnnnnnnnnnnnnnnnnnnnnnnnnnnnnnnnnnnnnnnnnnnnnnnnnnnnnnnnnnnnnnnnnnnnnnnnnnnnnnnnnnnnnnnnnnnnnnnnnnnnnnnnnnnnnnnnnnnnnnnnnnnnnnnnnnnnnnnnnnnnnnnnnnnnnnnnnnnnnnnnnnnnnnnnnnnnnnnnnnnnnnnnnnnnnnnnnnnnnnnnnnnnnnnnnnnnnnnnnnnnnnnnnnnnnnnnnnnnnnnnnnnnnnnnnnnnnnnnnnnnnnnnnnnnnnnnnnnnnnnnnnnnnnnnnnnnnnnnnnnnnnnnnnnnnnnnnnnnnnnnnnnnnnnnnnnnnnnnnnnnnnnnnnnnnnnnnnnnnnnnnnnnnnnnnnnnnnnnnnnnnnnnnnnnnnnnnnnnnnnnnnnnnnnnnnnnnnnnnnnnnnnnnnnnnnnnnnnnnnnnnnnnnnnnnnnnnnnnnnnnnnnnnnnnnnnnnnnnnnnnnnnnnnnnnnnnnnnnnnnnnnnnnnnnnnnnnnnnnnnnnnnnnnnnnnnnnnnnnnnnnnnnnnnnnnnnnnnnnnnnnnnnnnnnnnnnnnnnnnnnnnnnnnnnnnnnnnnnnnnnnnnnnnnnnnnnnnnnnnnnnnnnnnnnnnnnnnnnnnnnnnnnnnnnnnnnnnnnnnnnnnnnnnnnnnnnnnnnnnnnnnnnnnnnnnnnnnnnnnnnnnnnnnnnnnnnnnnnnnnnnnnnnnnnnnnnnnnnnnnnnnnnnnnnnnnnnnnnnnnnnnnnnnnnnnnnnnnnnnnnnnnnnnnnnnnnnnnnnnnnnnnnnnnnnnnnnnnnnnnnnnnnnnnnnnnnnnnnnnnnnnnnnnnnnnnnnnnnnnnnnnnnnnnnnnnnnnnnnnnnnnnnnnnnnnnnnnnnnnnnnnnnnnnnnnnnnnnnnnnnnnnnnnnnnnnnnnnnnnnnnnnnnnnnnnnnnnnnnnnnnnnnnnnnnnnnnnnnnnnnnnnnnnnnnnnnnnnnnnnnnnnnnnnnnnnnnnnnnnnnnnnnnnnnnnnnnnnnnnnnnnnnnnnnnnnnnnnnnnnnnnnnnnnnnnnnnnnnnnnnnnnnnnnnnnnnnnnnnnnnnnnnnnnnnnnnnnnnnnnnnnnnnnnnnnnnnnnnnnnnnnnnnnnnnnnnnnnnnnnnnnnnnnnnnnnnnnnnnnnnnnnnnnnnnnnnnnnnnnnnnnnnnnnnnnnnnnnnnnnnnnnnnnnnnnnnnnnnnnnnnnnnnnnnnnnnnnnnnnnnnnnnnnnnnnnnnnnnnnnnnnnnnnnnnnnnnnnnnnnnnnnnnnnnnnnnnnnnnnnnnnnnnnnnnnnnnnnnnnnnnnnnnnnnnnnnnnnnnnnnnnnnnnnnnnnnnnnnnnnnnnnnnnnnnnnnnnnnnnnnnnnnnnnnnnnnnnnnnnnnnnnnnnnnnnnnnnnnnnnnnnnnnnnnnnnnnnnnnnnnnnnnnnnnnnnnnnnnnnnnnnnnnnnnnnnnnnnnnnnnnnnnnnnnnnnnnnnnnnnnnnnnnnnnnnnnnnnnnnnnnnnnnnnnnnnnnnnnnnnnnnnnnnnnnnnnnnnnnnnnnnnnnnnnnnnnnnnnnnnnnnnnnnnnnnnnnnnnnnnnnnnnnnnnnnnnnnnnnnnnnnnnnnnnnnnnnnnnnnnnnnnnnnnnnnnnnnnnnnnnnnnnnnnnnnnnnnnnnnnnnnnnnnnnnnnnnnnnnnnnnnnnnnnnnnnnnnnnnnnnnnnnnnnnnnnnnnnnnnnnnnnnnnnnnnnnnnnnnnnnnnnnnnnnnnnnnnnnnnnnnnnnnnnnnnnnnnnnnnnnnnnnnnnnnnnnnnnnnnnnnnnnnnnnnnnnnnnnnnnnnnnnnnnnnnnnnnnnnnnnnnnnnnnnnnnnnnnnnnnnnnnnnnnnnnnnnnnnnnnnnnnnnnnnnnnnnnnnnnnnnnnnnnnnnnnnnnnnnnnnnnnnnnnnnnnnnnnnnnnnnnnnnnnnnnnnnnnnnnnnnnnnnnnnnnnnnnnnnnnnnnnnnnnnnnnnnnnnnnnnnnnnnnnnnnnnnnnnnnnnnnnnnnnnnnnnnnnnnnnnnnnnnnnnnnnnnnnnnnnnnnnnnnnnnnnnnnnnnnnnnnnnnnnnnnnnnnnnnnnnnnnnnnnnnnnnnnnnnnnnnnnnnnnnnnnnnnnnnnnnnnnnnnnnnnnnnnnnnnnnnnnnnnnnnnnnnnnnnnnnnnnnnnnnnnnnnnnnnnnnnnnnnnnnnnnnnnnnnnnnnnnnnnnnnnnnnnnnnnnnnnnnnnnnnnnnnnnnnnnnnnnnnnnnnnnnnnnnnnnnnnnnnnnnnnnnnnnnnnnnnnnnnnnnnnnnnnnnnnnnnnnnnnnnnnnnnnnnnnnnnnnnnnnnnnnnnnnnnnnnnnnnnnnnnnnnnnnnnnnnnnnnnnnnnnnnnnnnnnnnnnnnnnnnnnnnnnnnnnnnnnnnnnnnnnnnnnnnnnnnnnnnnnnnnnnnnnnnnnnnnnnnnnnnnnnnnnnnnnnnnnnnnnnnnnnnnnnnnnnnnnnnnnnnnnnnnnnnnnnnnnnnnnnnnnnnnnnnnnnnnnnnnnnnnnnnnnnnnnnnnnnnnnnnnnnnnnnnnnnnnnnnnnnnnnnnnnnnnnnnnnnnnnnnnnnnnnnnnnnnnnnnnnnnnnnnnnnnnnnnnnnnnnnnnnnnnnnnnnnnnnnnnnnnnnnnnnnnnnnnnnnnnnnnnnnnnnnnnnnnnnnnnnnnnnnnnnnnnnnnnnnnnnnnnnnnnnnnnnnnnnnnnnnnnnnnnnnnnnnnnnnnnnnnnnnnnnnnnnnnnnnnnnnnnnnnnnnnnnnnnnnnnnnnnnnnnnnnnnnnnnnnnnnnnnnnnnnnnnnnnnnnnnnnnnnnnnnnnnnnnnnnnnnnnnnnnnnnnnnnnnnnnnnnnnnnnnnnnnnnnnnnnnnnnnnnnnnnnnnnnnnnnnnnnnnnnnnnnnnnnnnnnnnnnnnnnnnnnnnnnnnnnnnnnnnnnnnnnnnnnnnnnnnnnnnnnnnnnnnnnnnnnnnnnnnnnnnnnnnnnnnnnnnnnnnnnnnnnnnnnnnnnnnnnnnnnnnnnnnnnnnnnnnnnnnnnnnnnnnnnnnnnnnnnnnnnnnnnnnnnnnnnnnnnnnnnnnnnnnnnnnnnnnnnnnnnnnnnnnnnnnnnnnnnnnnnnnnnnnnnnnnnnnnnnnnnnnnnnnnnnnnnnnnnnnnnnnnnnnnnnnnnnnnnnnnnnnnnnnnnnnnnnnnnnnnnnnnnnnnnnnnnnnnnnnnnnnnnnnnnnnnnnnnnnnnnnnnnnnnnnnnnnnnnnnnnnnnnnnnnnnnnnnnnnnnnnnnnnnnnnnnnnnnnnnnnnnnnnnnnnnnnnnnnnnnnnnnnnnnnnnnnnnnnnnnnnnnnnnnnnnnnnnnnnnnnnnnnnnnnnnnnnnnnnnnnnnnnnnnnnnnnnnnnnnnnnnnnnnnnnnnnnnnnnnnnnnnnnnnnnnnnnnnnnnnnnnnnnnnnnnnnnnnnnnnnnnnnnnnnnnnnnnnnnnnnnnnnnnnnnnnnnnnnnnnnnnnnnnnnnnnnnnnnnnnnnnnnnnnnnnnnnnnnnnnnnnnnnnnnnnnnnnnnnnnnnnnnnnnnnnnnnnnnnnnnnnnnnnnnnnnnnnnnnnnnnnnnnnnnnnnnnnnnnnnnnnnnnnnnnnnnnnnnnnnnnnnnnnnnnnnnnnnnnnnnnnnnnnnnnnnnnnnnnnnnnnnnnnnnnnnnnnnnnnnnnnnnnnnnnnnnnnnnnnnnnnnnnnnnnnnnnnnnnnnnnnnnnnnnnnnnnnnnnnnnnnnnnnnnnnnnnnnnnnnnnnnnnnnnnnnnnnnnnnnnnnnnnnnnnnnnnnnnnnnnnnnnnnnnnnnnnnnnnnnnnnnnnnnnnnnnnnnnnnnnnnnnnnnnnnnnnnnnnnnnnnnnnnnnnnnnnnnnnnnnnnnnnnnnnnnnnnnnnnnnnnnnnnnnnnnnnnnnnnnnnnnnnnnnnnnnnnnnnnnnnnnnnnnnnnnnnnnnnnnnnnnnnnnnnnnnnnnnnnnnnnnnnnnnnnnnnnnnnnnnnnnnnnnnnnnnnnnnnnnnnnnnnnnnnnnnnnnnnnnnnnnnnnnnnnnnnnnnnnnnnnnnnnnnnnnnnnnnnnnnnnnnnnnnnnnnnnnnnnnnnnnnnnnnnnnnnnnnnnnnnnnnnnnnnnnnnnnnnnnnnnnnnnnnnnnnnnnnnnnnnnnnnnnnnnnnnnnnnnnnnnnnnnnnnnnnnnnnnnnnnnnnnnnnnnnnnnnnnnnnnnnnnnnnnnnnnnnnnnnnnnnnnnnnnnnnnnnnnnnnnnnnnnnnnnnnnnnnnnnnnnnnnnnnnnnnnnnnnnnnnnnnnnnnnnnnnnnnnnnnnnnnnnnnnnnnnnnnnnnnnnnnnnnnnnnnnnnnnnnnnnnnnnnnnnnnnnnnnnnnnnnnnnnnnnnnnnnnnnnnnnnnnnnnnnnnnnnnnnnnnnnnnnnnnnnnnnnnnnnnnnnnnnnnnnnnnnnnnnnnnnnnnnnnnnnnnnnnnnnnnnnnnnnnnnnnnnnnnnnnnnnnnnnnnnnnnnnnnnnnnnnnnnnnnnnnnnnnnnnnnnnnnnnnnnnnnnnnnnnnnnnnnnnnnnnnnnnnnnnnnnnnnnnnnnnnnnnnnnnnnnnnnnnnnnnnnnnnnnnnnnnnnnnnnnnnnnnnnnnnnnnnnnnnnnnnnnnnnnnnnnnnnnnnnnnnnnnnnnnnnnnnnnnnnnnnnnnnnnnnnnnnnnnnnnnnnnnnnnnnnnnnnnnnnnnnnnnnnnnnnnnnnnnnnnnnnnnnnnnnnnnnnnnnnnnnnnnnnnnnnnnnnnnnnnnnnnnnnnnnnnnnnnnnnnnnnnnnnnnnnnnnnnnnnnnnnnnnnnnnnnnnnnnnnnnnnnnnnnnnnnnnnnnnnnnnnnnnnnnnnnnnnnnnnnnnnnnnnnnnnnnnnnnnnnnnnnnnnnnnnnnnnnnnnnnnnnnnnnnnnnnnnnnnnnnnnnnnnnnnnnnnnnnnnnnnnnnnnnnnnnnnnnnnnnnnnnnnnnnnnnnnnnnnnnnnnnnnnnnnnnnnnnnnnnnnnnnnnnnnnnnnnnnnnnnnnnnnnnnnnnnnnnnnnnnnnnnnnnnnnnnnnnnnnnnnnnnnnnnnnnnnnnnnnnnnnnnnnnnnnnnnnnnnnnnnnnnnnnnnnnnnnnnnnnnnnnnnnnnnnnnnnnnnnnnnnnnnnnnnnnnnnnnnnnnnnnnnnnnnnnnnnnnnnnnnnnnnnnnnnnnnnnnnnnnnnnnnnnnnnnnnnnnnnnnnnnnnnnnnnnnnnnnnnnnnnnnnnnnnnnnnnnnnnnnnnnnnnnnnnnnnnnnnnnnnnnnnnnnnnnnnnnnnnnnnnnnnnnnnnnnnnnnnnnnnnnnnnnnnnnnnnnnnnnnnnnnnnnnnnnnnnnnnnnnnnnnnnnnnnnnnnnnnnnnnnnnnnnnnnnnnnnnnnnnnnnnnnnnnnnnnnnnnnnnnnnnnnnnnnnnnnnnnnnnnnnnnnnnnnnnnnnnnnnnnnnnnnnnnnnnnnnnnnnnnnnnnnnnnnnnnnnnnnnnnnnnnnnnnnnnnnnnnnnnnnnnnnnnnnnnnnnnnnnnnnnnnnnnnnnnnnnnnnnnnnnnnnnnnnnnnnnnnnnnnnnnnnnnnnnnnnnnnnnnnnnnnnnnnnnnnnnnnnnnnnnnnnnnnnnnnnnnnnnnnnnnnnnnnnnnnnnnnnnnnnnnnnnnnnnnnnnnnnnnnnnnnnnnnnnnnnnnnnnnnnnnnnnnnnnnnnnnnnnnnnnnnnnnnnnnnnnnnnnnnnnnnnnnnnnnnnnnnnnnnnnnnnnnnnnnnnnnnnnnnnnnnnnnnnnnnnnnnnnnnnnnnnnnnnnnnnnnnnnnnnnnnnnnnnnnnnnnnnnnnnnnnnnnnnnnnnnnnnnnnnnnnnnnnnnnnnnnnnnnnnnnnnnnnnnnnnnnnnnnnnnnnnnnnnnnnnnnnnnnnnnnnnnnnnnnnnnnnnnnnnnnnnnnnnnnnnnnnnnnnnnnnnnnnnnnnnnnnnnnnnnnnnnnnnnnnnnnnnnnnnnnnnnnnnnnnnnnnnnnnnnnnnnnnnnnnnnnnnnnnnnnnnnnnnnnnnnnnnnnnnnnnnnnnnnnnnnnnnnnnnnnnnnnnnnnnnnnnnnnnnnnnnnnnnnnnnnnnnnnnnnnnnnnnnnnnnnnnnnnnnnnnnnnnnnnnnnnnnnnnnnnnnnnnnnnnnnnnnnnnnnnnnnnnnnnnnnnnnnnnnnnnnnnnnnnnnnnnnnnnnnnnnnnnnnnnnnnnnnnnnnnnnnnnnnnnnnnnnnnnnnnnnnnnnnnnnnnnnnnnnnnnnnnnnnnnnnnnnnnnnnnnnnnnnnnnnnnnnnnnnnnnnnnnnnnnnnnnnnnnnnnnnnnnnnnnnnnnnnnnnnnnnnnnnnnnnnnnnnnnnnnnnnnnnnnnnnnnnnnnnnnnnnnnnnnnnnnnnnnnnnnnnnnnnnnnnnnnnnnnnnnnnnnnnnnnnnnnnnnnnnnnnnnnnnnnnnnnnnnnnnnnnnnnnnnnnnnnnnnnnnnnnnnnnnnnnnnnnnnnnnnnnnnnnnnnnnnnnnnnnnnnnnnnnnnnnnnnnnnnnnnnnnnnnnnnnnnnnnnnnnnnnnnnnnnnnnnnnnnnnnnnnnnnnnnnnnnnnnnnnnnnnnnnnnnnnnnnnnnnnnnnnnnnnnnnnnnnnnnnnnnnnnnnnnnnnnnnnnnnnnnnnnnnnnnnnnnnnnnnnnnnnnnnnnnnnnnnnnnnnnnnnnnnnnnnnnnnnnnnnnnnnnnnnnnnnnnnnnnnnnnnnnnnnnnnnnnnnnnnnnnnnnnnnnnnnnnnnnnnnnnnnnnnnnnnnnnnnnnnnnnnnnnnnnnnnnnnnnnnnnnnnnnnnnnnnnnnnnnnnnnnnnnnnnnnnnnnnnnnnnnnnnnnnnnnnnnnnnnnnnnnnnnnnnnnnnnnnnnnnnnnnnnnnnnnnnnnnnnnnnnnnnnnnnnnnnnnnnnnnnnnnnnnnnnnnnnnnnnnnnnnnnnnnnnnnnnnnnnnnnnnnnnnnnnnnnnnnnnnnnnnnnnnnnnnnnnnnnnnnnnnnnnnnnnnnnnnnnnnnnnnnnnnnnnnnnnnnnnnnnnnnnnnnnnnnnnnnnnnnnnnnnnnnnnnnnnnnnnnnnnnnnnnnnnnnnnnnnnnnnnnnnnnnnnnnnnnnnnnnnnnnnnnnnnnnnnnnnnnnnnnnnnnnnnnnnnnnnnnnnnnnnnnnnnnnnnnnnnnnnnnnnnnnnnnnnnnnnnnnnnnnnnnnnnnnnnnnnnnnnnnnnnnnnnnnnnnnnnnnnnnnnnnnnnnnnnnnnnnnnnnnnnnnnnnnnnnnnnnnnnnnnnnnnnnnnnnnnnnnnnnnnnnnnnnnnnnnnnnnnnnnnnnnnnnnnnnnnnnnnnnnnnnnnnnnnnnnnnnnnnnnnnnnnnnnnnnnnnnnnnnnnnnnnnnnnnnnnnnnnnnnnnnnnnnnnnnnnnnnnnnnnnnnnnnnnnnnnnnnnnnnnnnnnnnnnnnnnnnnnnnnnnnnnnnnnnnnnnnnnnnnnnnnnnnnnnnnnnnnnnnnnnnnnnnnnnnnnnnnnnnnnnnnnnnnnnnnnnnnnnnnnnnnnnnnnnnnnnnnnnnnnnnnnnnnnnnnnnnnnnnnnnnnnnnnnnnnnnnnnnnnnnnnnnnnnnnnnnnnnnnnnnnnnnnnnnnnnnnnnnnnnnnnnnnnnnnnnnnnnnnnnnnnnnnnnnnnnnnnnnnnnnnnnnnnnnnnnnnnnnnnnnnnnnnnnnnnnnnnnnnnnnnnnnnnnnnnnnnnnnnnnnnnnnnnnnnnnnnnnnnnnnnnnnnnnnnnnnnnnnnnnnnnnnnnnnnnnnnnnnnnnnnnnnnnnnnnnnnnnnnnnnnnnnnnnnnnnnnnnnnnnnnnnnnnnnnnnnnnnnnnnnnnnnnnnnnnnnnnnnnnnnnnnnnnnnnnnnnnnnnnnnnnnnnnnnnnnnnnnnnnnnnnnnnnnnnnnnnnnnnnnnnnnnnnnnnnnnnnnnnnnnnnnnnnnnnnnnnnnnnnnnnnnnnnnnnnnnnnnnnnnnnnnnnnnnnnnnnnnnnnnnnnnnnnnnnnnnnnnnnnnnnnnnnnnnnnnnnnnnnnnnnnnnnnnnnnnnnnnnnnnnnnnnnnnnnnnnnnnnnnnnnnnnnnnnnnnnnnnnnnnnnnnnnnnnnnnnnnnnnnnnnnnnnnnnnnnnnnnnnnnnnnnnnnnnnnnnnnnnnnnnnnnnnnnnnnnnnnnnnnnnnnnnnnnnnnnnnnnnnnnnnnnnnnnnnnnnnnnnnnnnnnnnnnnnnnnnnnnnnnnnnnnnnnnnnnnnnnnnnnnnnnnnnnnnnnnnnnnnnnnnnnnnnnnnnnnnnnnnnnnnnnnnnnnnnnnnnnnnnnnnnnnnnnnnnnnnnnnnnnnnnnnnnnnnnnnnnnnnnnnnnnnnnnnnnnnnnnnnnnnnnnnnnnnnnnnnnnnnnnnnnnnnnnnnnnnnnnnnnnnnnnnnnnnnnnnnnnnnnnnnnnnnnnnnnnnnnnnnnnnnnnnnnnnnnnnnnnnnnnnnnnnnnnnnnnnnnnnnnnnnnnnnnnnnnnnnnnnnnnnnnnnnnnnnnnnnnnnnnnnnnnnnnnnnnnnnnnnnnnnnnnnnnnnnnnnnnnnnnnnnnnnnnnnnnnnnnnnnnnnnnnnnnnnnnnnnnnnnnnnnnnnnnnnnnnnnnnnnnnnnnnnnnnnnnnnnnnnnnnnnnnnnnnnnnnnnnnnnnnnnnnnnnnnnnnnnnnnnnnnnnnnnnnnnnnnnnnnnnnnnnnnnnnnnnnnnnnnnnnnnnnnnnnnnnnnnnnnnnnnnnnnnnnnnnnnnnnnnnnnnnnnnnnnnnnnnnnnnnnnnnnnnnnnnnnnnnnnnnnnnnnnnnnnnnnnnnnnnnnnnnnnnnnnnnnnnnnnnnnnnnnnnnnnnnnnnnnnnnnnnnnnnnnnnnnnnnnnnnnnnnnnnnnnnnnnnnnnnnnnnnnnnnnnnnnnnnnnnnnnnnnnnnnnnnnnnnnnnnnnnnnnnnnnnnnnnnnnnnnnnnnnnnnnnnnnnnnnnnnnnnnnnnnnnnnnnnnnnnnnnnnnnnnnnnnnnnnnnnnnnnnnnnnnnnnnnnnnnnnnnnnnnnnnnnnnnnnnnnnnnnnnnnnnnnnnnnnnnnnnnnnnnnnnnnnnnnnnnnnnnnnnnnnnnnnnnnnnnnnnnnnnnnnnnnnnnnnnnnnnnnnnnnnnnnnnnnnnnnnnnnnnnnnnnnnnnnnnnnnnnnnnnnnnnnnnnnnnnnnnnnnnnnnnnnnnnnnnnnnnnnnnnnnnnnnnnnnnnnnnnnnnnnnnnnnnnnnnnnnnnnnnnnnnnnnnnnnnnnnnnnnnnnnnnnnnnnnnnnnnnnnnnnnnnnnnnnnnnnnnnnnnnnnnnnnnnnnnnnnnnnnnnnnnnnnnnnnnnnnnnnnnnnnnnnnnnnnnnnnnnnnnnnnnnnnnnnnnnnnnnnnnnnnnnnnnnnnnnnnnnnnnnnnnnnnnnnnnnnnnnnnnnnnnnnnnnnnnnnnnnnnnnnnnnnnnnnnnnnnnnnnnnnnnnnnnnnnnnnnnnnnnnnnnnnnnnnnnnnnnnnnnnnnnnnnnnnnnnnnnnnnnnnnnnnnnnnnnnnnnnnnnnnnnnnnnnnnnnnnnnnnnnnnnnnnnnnnnnnnnnnnnnnnnnnnnnnnnnnnnnnnnnnnnnnnnnnnnnnnnnnnnnnnnnnnnnnnnnnnnnnnnnnnnnnnnnnnnnnnnnnnnnnnnnnnnnnnnnnnnnnnnnnnnnnnnnnnnnnnnnnnnnnnnnnnnnnnnnnnnnnnnnnnnnnnnnnnnnnnnnnnnnnnnnnnnnnnnnnnnnnnnnnnnnnnnnnnnnnnnnnnnnnnnnnnnnnnnnnnnnnnnnnnnnnnnnnnnnnnnnnnnnnnnnnnnnnnnnnnnnnnnnnnnnnnnnnnnnnnnnnnnnnnnnnnnnnnnnnnnnnnnnnnnnnnnnnnnnnnnnnnnnnnnnnnnnnnnnnnnnnnnnnnnnnnnnnnnnnnnnnnnnnnnnnnnnnnnnnnnnnnnnnnnnnnnnnnnnnnnnnnnnnnnnnnnnnnnnnnnnnnnnnnnnnnnnnnnnnnnnnnnnnnnnnnnnnnnnnnnnnnnnnnnnnnnnnnnnnnnnnnnnnnnnnnnnnnnnnnnnnnnnnnnnnnnnnnnnnnnnnnnnnnnnnnnnnnnnnnnnnnnnnnnnnnnnnnnnnnnnnnnnnnnnnnnnnnnnnnnnnnnnnnnnnnnnnnnnnnnnnnnnnnnnnnnnnnnnnnnnnnnnnnnnnnnnnnnnnnnnnnnnnnnnnnnnnnnnnnnnnnnnnnnnnnnnnnnnnnnnnnnnnnnnnnnnnnnnnnnnnnnnnnnnnnnnnnnnnnnnnnnnnnnnnnnnnnnnnnnnnnnnnnnnnnnnnnnnnnnnnnnnnnnnnnnnnnnnnnnnnnnnnnnnnnnnnnnnnnnnnnnnnnnnnnnnnnnnnnnnnnnnnnnnnnnnnnnnnnnnnnnnnnnnnnnnnnnnnnnnnnnnnnnnnnnnnnnnnnnnnnnnnnnnnnnnnnnnnnnnnnnnnnnnnnnnnnnnnnnnnnnnnnnnnnnnnnnnnnnnnnnnnnnnnnnnnnnnnnnnnnnnnnnnnnnnnnnnnnnnnnnnnnnnnnnnnnnnnnnnnnnnnnnnnnnnnnnnnnnnnnnnnnnnnnnnnnnnnnnnnnnnnnnnnnnnnnnnnnnnnnnnnnnnnnnnnnnnnnnnnnnnnnnnnnnnnnnnnnnnnnnnnnnnnnnnnnnnnnnnnnnnnnnnnnnnnnnnnnnnnnnnnnnnnnnnnnnnnnnnnnnnnnnnnnnnnnnnnnnnnnnnnnnnnnnnnnnnnnnnnnnnnnnnnnnnnnnnnnnnnnnnnnnnnnnnnnnnnnnnnnnnnnnnnnnnnnnnnnnnnnnnnnnnnnnnnnnnnnnnnnnnnnnnnnnnnnnnnnnnnnnnnnnnnnnnnnnnnnnnnnnnnnnnnnnnnnnnnnnnnnnnnnnnnnnnnnnnnnnnnnnnnnnnnnnnnnnnnnnnnnnnnnnnnnnnnnnnnnnnnnnnnnnnnnnnnnnnnnnnnnnnnnnnnnnnnnnnnnnnnnnnnnnnnnnnnnnnnnnnnnnnnnnnnnnnnnnnnnnnnnnnnnnnnnnnnnnnnnnnnnnnnnnnnnnnnnnnnnnnnnnnnnnnnnnnnnnnnnnnnnnnnnnnnnnnnnnnnnnnnnnnnnnnnnnnnnnnnnnnnnnnnnnnnnnnnnnnnnnnnnnnnnnnnnnnnnnnnnnnnnnnnnnnnnnnnnnnnnnnnnnnnnnnnnnnnnnnnnnnnnnnnnnnnnnnnnnnnnnnnnnnnnnnnnnnnnnnnnnnnnnnnnnnnnnnnnnnnnnnnnnnnnnnnnnnnnnnnnnnnnnnnnnnnnnnnnnnnnnnnnnnnnnnnnnnnnnnnnnnnnnnnnnnnnnnnnnnnnnnnnnnnnnnnnnnnnnnnnnnnnnnnnnnnnnnnnnnnnnnnnnnnnnnnnnnnnnnnnnnnnnnnnnnnnnnnnnnnnnnnnnnnnnnnnnnnnnnnnnnnnnnnnnnnnnnnnnnnnnnnnnnnnnnnnnnnnnnnnnnnnnnnnnnnnnnnnnnnnnnnnnnnnnnnnnnnnnnnnnnnnnnnnnnnnnnnnnnnnnnnnnnnnnnnnnnnnnnnnnnnnnnnnnnnnnnnnnnnnnnnnnnnnnnnnnnnnnnnnnnnnnnnnnnnnnnnnnnnnnnnnnnnnnnnnnnnnnnnnnnnnnnnnnnnnnnnnnnnnnnnnnnnnnnnnnnnnnnnnnnnnnnnnnnnnnnnnnnnnnnnnnnnnnnnnnnnnnnnnnnnnnnnnnnnnnnnnnnnnnnnnnnnnnnnnnnnnnnnnnnnnnnnnnnnnnnnnnnnnnnnnnnnnnnnnnnnnnnnnnnnnnnnnnnnnnnnnnnnnnnnnnnnnnnnnnnnnnnnnnnnnnnnnnnnnnnnnnnnnnnnnnnnnnnnnnnnnnnnnnnnnnnnnnnnnnnnnnnnnnnnnnnnnnnnnnnnnnnnnnnnnnnnnnnnnnnnnnnnnnnnnnnnnnnnnnnnnnnnnnnnnnnnnnnnnnnnnnnnnnnnnnnnnnnnnnnnnnnnnnnnnnnnnnnnnnnnnnnnnnnnnnnnnnnnnnnnnnnnnnnnnnnnnnnnnnnnnnnnnnnnnnnnnnnnnnnnnnnnnnnnnnnnnnnnnnnnnnnnnnnnnnnnnnnnnnnnnnnnnnnnnnnnnnnnnnnnnnnnnnnnnnnnnnnnnnnnnnnnnnnnnnnnnnnnnnnnnnnnnnnnnnnnnnnnnnnnnnnnnnnnnnnnnnnnnnnnnnnnnnnnnnnnnnnnnnnnnnnnnnnnnnnnnnnnnnnnnnnnnnnnnnnnnnnnnnnnnnnnnnnnnnnnnnnnnnnnnnnnnnnnnnnnnnnnnnnnnnnnnnnnnnnnnnnnnnnnnnnnnnnnnnnnnnnnnnnnnnnnnnnnnnnnnnnnnnnnnnnnnnnnnnnnnnnnnnnnnnnnnnnnnnnnnnnnnnnnnnnnnnnnnnnnnnnnnnnnnnnnnnnnnnnnnnnnnnnnnnnnnnnnnnnnnnnnnnnnnnnnnnnnnnnnnnnnnnnnnnnnnnnnnnnnnnnnnnnnnnnnnnnnnnnnnnnnnnnnnnnnnnnnnnnnnnnnnnnnnnnnnnnnnnnnnnnnnnnnnnnnnnnnnnnnnnnnnnnnnnnnnnnnnnnnnnnnnnnnnnnnnnnnnnnnnnnnnnnnnnnnnnnnnnnnnnnnnnnnnnnnnnnnnnnnnnnnnnnnnnnnnnnnnnnnnnnnnnnnnnnnnnnnnnnnnnnnnnnnnnnnnnnnnnnnnnnnnnnnnnnnnnnnnnnnnnnnnnnnnnnnnnnnnnnnnnnnnnnnnnnnnnnnnnnnnnnnnnnnnnnnnnnnnnnnnnnnnnnnnnnnnnnnnnnnnnnnnnnnnnnnnnnnnnnnnnnnnnnnnnnnnnnnnnnnnnnnnnnnnnnnnnnnnnnnnnnnnnnnnnnnnnnnnnnnnnnnnnnnnnnnnnnnnnnnnnnnnnnnnnnnnnnnnnnnnnnnnnnnnnnnnnnnnnnnnnnnnnnnnnnnnnnnnnnnnnnnnnnnnnnnnnnnnnnnnnnnnnnnnnnnnnnnnnnnnnnnnnnnnnnnnnnnnnnnnnnnnnnnnnnnnnnnnnnnnnnnnnnnnnnnnnnnnnnnnnnnnnnnnnnnnnnnnnnnnnnnnnnnnnnnnnnnnnnnnnnnnnnnnnnnnnnnnnnnnnnnnnnnnnnnnnnnnnnnnnnnnnnnnnnnnnnnnnnnnnnnnnnnnnnnnnnnnnnnnnnnnnnnnnnnnnnnnnnnnnnnnnnnnnnnnnnnnnnnnnnnnnnnnnnnnnnnnnnnnnnnnnnnnnnnnnnnnnnnnnnnnnnnnnnnnnnnnnnnnnnnnnnnnnnnnnnnnnnnnnnnnnnnnnnnnnnnnnnnnnnnnnnnnnnnnnnnnnnnnnnnnnnnnnnnnnnnnnnnnnnnnnnnnnnnnnnnnnnnnnnnnnnnnnnnnnnnnnnnnnnnnnnnnnnnnnnnnnnnnnnnnnnnnnnnnnnnnnnnnnnnnnnnnnnnnnnnnnnnnnnnnnnnnnnnnnnnnnnnnnnnnnnnnnnnnnnnnnnnnnnnnnnnnnnnnnnnnnnnnnnnnnnnnnnnnnnnnnnnnnnnnnnnnnnnnnnnnnnnnnnnnnnnnnnnnnnnnnnnnnnnnnnnnnnnnnnnnnnnnnnnnnnnnnnnnnnnnnnnnnnnnnnnnnnnnnnnnnnnnnnnnnnnnnnnnnnnnnnnnnnnnnnnnnnnnnnnnnnnnnnnnnnnnnnnnnnnnnnnnnnnnnnnnnnnnnnnnnnnnnnnnnnnnnnnnnnnnnnnnnnnnnnnnnnnnnnnnnnnnnnnnnnnnnnnnnnnnnnnnnnnnnnnnnnnnnnnnnnnnnnnnnnnnnnnnnnnnnnnnnnnnnnnnnnnnnnnnnnnnnnnnnnnnnnnnnnnnnnnnnnnnnnnnnnnnnnnnnnnnnnnnnnnnnnnnnnnnnnnnnnnnnnnnnnnnnnnnnnnnnnnnnnnnnnnnnnnnnnnnnnnnnnnnnnnnnnnnnnnnnnnnnnnnnnnnnnnnnnnnnnnnnnnnnnnnnnnnnnnnnnnnnnnnnnnnnnnnnnnnnnnnnnnnnnnnnnnnnnnnnnnnnnnnnnnnnnnnnnnnnnnnnnnnnnnnnnnnnnnnnnnnnnnnnnnnnnnnnnnnnnnnnnnnnnnnnnnnnnnnnnnnnnnnnnnnnnnnnnnnnnnnnnnnnnnnnnnnnnnnnnnnnnnnnnnnnnnnnnnnnnnnnnnnnnnnnnnnnnnnnnnnnnnnnnnnnnnnnnnnnnnnnnnnnnnnnnnnnnnnnnnnnnnnnnnnnnnnnnnnnnnnnnnnnnnnnnnnnnnnnnnnnnnnnnnnnnnnnnnnnnnnnnnnnnnnnnnnnnnnnnnnnnnnnnnnnnnnnnnnnnnnnnnnnnnnnnnnnnnnnnnnnnnnnnnnnnnnnnnnnnnnnnnnnnnnnnnnnnnnnnnnnnnnnnnnnnnnnnnnnnnnnnnnnnnnnnnnnnnnnnnnnnnnnnnnnnnnnnnnnnnnnnnnnnnnnnnnnnnnnnnnnnnnnnnnnnnnnnnnnnnnnnnnnnnnnnnnnnnnnnnnnnnnnnnnnnnnnnnnnnnnnnnnnnnnnnnnnnnnnnnnnnnnnnnnnnnnnnnnnnnnnnnnnnnnnnnnnnnnnnnnnnnnnnnnnnnnnnnnnnnnnnnnnnnnnnnnnnnnnnnnnnnnnnnnnnnnnnnnnnnnnnnnnnnnnnnnnnnnnnnnnnnnnnnnnnnnnnnnnnnnnnnnnnnnnnnnnnnnnnnnnnnnnnnnnnnnnnnnnnnnnnnnnnnnnnnnnnnnnnnnnnnnnnnnnnnnnnnnnnnnnnnnnnnnnnnnnnnnnnnnnnnnnnnnnnnnnnnnnnnnnnnnnnnnnnnnnnnnnnnnnnnnnnnnnnnnnnnnnnnnnnnnnnnnnnnnnnnnnnnnnnnnnnnnnnnnnnnnnnnnnnnnnnnnnnnnnnnnnnnnnnnnnnnnnnnnnnnnnnnnnnnnnnnnnnnnnnnnnnnnnnnnnnnnnnnnnnnnnnnnnnnnnnnnnnnnnnnnnnnnnnnnnnnnnnnnnnnnnnnnnnnnnnnnnnnnnnnnnnnnnnnnnnnnnnnnnnnnnnnnnnnnnnnnnnnnnnnnnnnnnnnnnnnnnnnnnnnnnnnnnnnnnnnnnnnnnnnnnnnnnnnnnnnnnnnnnnnnnnnnnnnnnnnnnnnnnnnnnnnnnnnnnnnnnnnnnnnnnnnnnnnnnnnnnnnnnnnnnnnnnnnnnnnnnnnnnnnnnnnnnnnnnnnnnnnnnnnnnnnnnnnnnnnnnnnnnnnnnnnnnnnnnnnnnnnnnnnnnnnnnnnnnnnnnnnnnnnnnnnnnnnnnnnnnnnnnnnnnnnnnnnnnnnnnnnnnnnnnnnnnnnnnnnnnnnnnnnnnnnnnnnnnnnnnnnnnnnnnnnnnnnnnnnnnnnnnnnnnnnnnnnnnnnnnnnnnnnnnnnnnnnnnnnnnnnnnnnnnnnnnnnnnnnnnnnnnnnnnnnnnnnnnnnnnnnnnnnnnnnnnnnnnnnnnnnnnnnnnnnnnnnnnnnnnnnnnnnnnnnnnnnnnnnnnnnnnnnnnnnnnnnnnnnnnnnnnnnnnnnnnnnnnnnnnnnnnnnnnnnnnnnnnnnnnnnnnnnnnnnnnnnnnnnnnnnnnnnnnnnnnnnnnnnnnnnnnnnnnnnnnnnnnnnnnnnnnnnnnnnnnnnnnnnnnnnnnnnnnnnnnnnnnnnnnnnnnnnnnnnnnnnnnnnnnnnnnnnnnnnnnnnnnnnnnnnnnnnnnnnnnnnnnnnnnnnnnnnnnnnnnnnnnnnnnnnnnnnnnnnnnnnnnnnnnnnnnnnnnnnnnnnnnnnnnnnnnnnnnnnnnnnnnnnnnnnnnnnnnnnnnnnnnnnnnnnnnnnnnnnnnnnnnnnnnnnnnnnnnnnnnnnnnnnnnnnnnnnnnnnnnnnnnnnnnnnnnnnnnnnnnnnnnnnnnnnnnnnnnnnnnnnnnnnnnnnnnnnnnnnnnnnnnnnnnnnnnnnnnnnnnnnnnnnnnnnnnnnnnnnnnnnnnnnnnnnnnnnnnnnnnnnnnnnnnnnnnnnnnnnnnnnnnnnnnnnnnnnnnnnnnnnnnnnnnnnnnnnnnnnnnnnnnnnnnnnnnnnnnnnnnnnnnnnnnnnnnnnnnnnnnnnnnnnnnnnnnnnnnnnnnnnnnnnnnnnnnnnnnnnnnnnnnnnnnnnnnnnnnnnnnnnnnnnnnnnnnnnnnnnnnnnnnnnnnnnnnnnnnnnnnnnnnnnnnnnnnnnnnnnnnnnnnnnnnnnnnnnnnnnnnnnnnnnnnnnnnnnnnnnnnnnnnnnnnnnnnnnnnnnnnnnnnnnnnnnnnnnnnnnnnnnnnnnnnnnnnnnnnnnnnnnnnnnnnnnnnnnnnnnnnnnnnnnnnnnnnnnnnnnnnnnnnnnnnnnnnnnnnnnnnnnnnnnnnnnnnnnnnnnnnnnnnnnnnnnnnnnnnnnnnnnnnnnnnnnnnnnnnnnnnnnnnnnnnnnnnnnnnnnnnnnnnnnnnnnnnnnnnnnnnnnnnnnnnnnnnnnnnnnnnnnnnnnnnnnnnnnnnnnnnnnnnnnnnnnnnnnnnnnnnnnnnnnnnnnnnnnnnnnnnnnnnnnnnnnnnnnnnnnnnnnnnnnnnnnnnnnnnnnnnnnnnnnnnnnnnnnnnnnnnnnnnnnnnnnnnnnnnnnnnnnnnnnnnnnnnnnnnnnnnnnnnnnnnnnnnnnnnnnnnnnnnnnnnnnnnnnnnnnnnnnnnnnnnnnnnnnnnnnnnnnnnnnnnnnnnnnnnnnnnnnnnnnnnnnnnnnnnnnnnnnnnnnnnnnnnnnnnnnnnnnnnnnnnnnnnnnnnnnnnnnnnnnnnnnnnnnnnnnnnnnnnnnnnnnnnnnnnnnnnnnnnnnnnnnnnnnnnnnnnnnnnnnnnnnnnnnnnnnnnnnnnnnnnnnnnnnnnnnnnnnnnnnnnnnnnnnnnnnnnnnnnnnnnnnnnnnnnnnnnnnnnnnnnnnnnnnnnnnnnnnnnnnnnnnnnnnnnnnnnnnnnnnnnnnnnnnnnnnnnnnnnnnnnnnnnnnnnnnnnnnnnnnnnnnnnnnnnnnnnnnnnnnnnnnnnnnnnnnnnnnnnnnnnnnnnnnnnnnnnnnnnnnnnnnnnnnnnnnnnnnnnnnnnnnnnnnnnnnnnnnnnnnnnnnnnnnnnnnnnnnnnnnnnnnnnnnnnnnnnnnnnnnnnnnnnnnnnnnnnnnnnnnnnnnnnnnnnnnnnnnnnnnnnnnnnnnnnnnnnnnnnnnnnnnnnnnnnnnnnnnnnnnnnnnnnnnnnnnnnnnnnnnnnnnnnnnnnnnnnnnnnnnnnnnnnnnnnnnnnnnnnnnnnnnnnnnnnnnnnnnnnnnnnnnnnnnnnnnnnnnnnnnnnnnnnnnnnnnnnnnnnnnnnnnnnnnnnnnnnnnnnnnnnnnnnnnnnnnnnnnnnnnnnnnnnnnnnnnnnnnnnnnnnnnnnnnnnnnnnnnnnnnnnnnnnnnnnnnnnnnnnnnnnnnnnnnnnnnnnnnnnnnnnnnnnnnnnnnnnnnnnnnnnnnnnnnnnnnnnnnnnnnnnnnnnnnnnnnnnnnnnnnnnnnnnnnnnnnnnnnnnnnnnnnnnnnnnnnnnnnnnnnnnnnnnnnnnnnnnnnnnnnnnnnnnnnnnnnnnnnnnnnnnnnnnnnnnnnnnnnnnnnnnnnnnnnnnnnnnnnnnnnnnnnnnnnnnnnnnnnnnnnnnnnnnnnnnnnnnnnnnnnnnnnnnnnnnnnnnnnnnnnnnnnnnnnnnnnnnnnnnnnnnnnnnnnnnnnnnnnnnnnnnnnnnnnnnnnnnnnnnnnnnnnnnnnnnnnnnnnnnnnnnnnnnnnnnnnnnnnnnnnnnnnnnnnnnnnnnnnnnnnnnnnnnnnnnnnnnnnnnnnnnnnnnnnnnnnnnnnnnnnnnnnnnnnnnnnnnnnnnnnnnnnnnnnnnnnnnnnnnnnnnnnnnnnnnnnnnnnnnnnnnnnnnnnnnnnnnnnnnnnnnnnnnnnnnnnnnnnnnnnnnnnnnnnnnnnnnnnnnnnnnnnnnnnnnnnnnnnnnnnnnnnnnnnnnnnnnnnnnnnnnnnnnnnnnnnnnnnnnnnnnnnnnnnnnnnnnnnnnnnnnnnnnnnnnnnnnnnnnnnnnnnnnnnnnnnnnnnnnnnnnnnnnnnnnnnnnnnnnnnnnnnnnnnnnnnnnnnnnnnnnnnnnnnnnnnnnnnnnnnnnnnnnnnnnnnnnnnnnnnnnnnnnnnnnnnnnnnnnnnnnnnnnnnnnnnnnnnnnnnnnnnnnnnnnnnnnnnnnnnnnnnnnnnnnnnnnnnnnnnnnnnnnnnnnnnnnnnnnnnnnnnnnnnnnnnnnnnnnnnnnnnnnnnnnnnnnnnnnnnnnnnnnnnnnnnnnnnnnnnnnnnnnnnnnnnnnnnnnnnnnnnnnnnnnnnnnnnnnnnnnnnnnnnnnnnnnnnnnnnnnnnnnnnnnnnnnnnnnnnnnnnnnnnnnnnnnnnnnnnnnnnnnnnnnnnnnnnnnnnnnnnnnnnnnnnnnnnnnnnnnnnnnnnnnnnnnnnnnnnnnnnnnnnnnnnnnnnnnnnnnnnnnnnnnnnnnnnnnnnnnnnnnnnnnnnnnnnnnnnnnnnnnnnnnnnnnnnnnnnnnnnnnnnnnnnnnnnnnnnnnnnnnnnnnnnnnnnnnnnnnnnnnnnnnnnnnnnnnnnnnnnnnnnnnnnnnnnnnnnnnnnnnnnnnnnnnnnnnnnnnnnnnnnnnnnnnnnnnnnnnnnnnnnnnnnnnnnnnnnnnnnnnnnnnnnnnnnnnnnnnnnnnnnnnnnnnnnnnnnnnnnnnnnnnnnnnnnnnnnnnnnnnnnnnnnnnnnnnnnnnnnnnnnnnnnnnnnnnnnnnnnnnnnnnnnnnnnnnnnnnnnnnnnnnnnnnnnnnnnnnnnnnnnnnnnnnnnnnnnnnnnnnnnnnnnnnnnnnnnnnnnnnnnnnnnnnnnnnnnnnnnnnnnnnnnnnnnnnnnnnnnnnnnnnnnnnnnnnnnnnnnnnnnnnnnnnnnnnnnnnnnnnnnnnnnnnnnnnnnnnnnnnnnnnnnnnnnnnnnnnnnnnnnnnnnnnnnnnnnnnnnnnnnnnnnnnnnnnnnnnnnnnnnnnnnnnnnnnnnnnnnnnnnnnnnnnnnnnnnnnnnnnnnnnnnnnnnnnnnnnnnnnnnnnnnnnnnnnnnnnnnnnnnnnnnnnnnnnnnnnnnnnnnnnnnnnnnnnnnnnnnnnnnnnnnnnnnnnnnnnnnnnnnnnnnnnnnnnnnnnnnnnnnnnnnnnnnnnnnnnnnnnnnnnnnnnnnnnnnnnnnnnnnnnnnnnnnnnnnnnnnnnnnnnnnnnnnnnnnnnnnnnnnnnnnnnnnnnnnnnnnnnnnnnnnnnnnnnnnnnnnnnnnnnnnnnnnnnnnnnnnnnnnnnnnnnnnnnnnnnnnnnnnnnnnnnnnnnnnnnnnnnnnnnnnnnnnnnnnnnnnnnnnnnnnnnnnnnnnnnnnnnnnnnnnnnnnnnnnnnnnnnnnnnnnnnnnnnnnnnnnnnnnnnnnnnnnnnnnnnnnnnnnnnnnnnnnnnnnnnnnnnnnnnnnnnnnnnnnnnnnnnnnnnnnnnnnnnnnnnnnnnnnnnnnnnnnnnnnnnnnnnnnnnnnnnnnnnnnnnnnnnnnnnnnnnnnnnnnnnnnnnnnnnnnnnnnnnnnnnnnnnnnnnnnnnnnnnnnnnnnnnnnnnnnnnnnnnnnnnnnnnnnnnnnnnnnnnnnnnnnnnnnnnnnnnnnnnnnnnnnnnnnnnnnnnnnnnnnnnnnnnnnnnnnnnnnnnnnnnnnnnnnnnnnnnnnnnnnnnnnnnnnnnnnnnnnnnnnnnnnnnnnnnnnnnnnnnnnnnnnnnnnnnnnnnnnnnnnnnnnnnnnnnnnnnnnnnnnnnnnnnnnnnnnnnnnnnnnnnnnnnnnnnnnnnnnnnnnnnnnnnnnnnnnnnnnnnnnnnnnnnnnnnnnnnnnnnnnnnnnnnnnnnnnnnnnnnnnnnnnnnnnnnnnnnnnnnnnnnnnnnnnnnnnnnnnnnnnnnnnnnnnnnnnnnnnnnnnnnnnnnnnnnnnnnnnnnnnnnnnnnnnnnnnnnnnnnnnnnnnnnnnnnnnnnnnnnnnnnnnnnnnnnnnnnnnnnnnnnnnnnnnnnnnnnnnnnnnnnnnnnnnnnnnnnnnnnnnnnnnnnnnnnnnnnnnnnnnnnnnnnnnnnnnnnnnnnnnnnnnnnnnnnnnnnnnnnnnnnnnnnnnnnnnnnnnnnnnnnnnnnnnnnnnnnnnnnnnnnnnnnnnnnnnnnnnnnnnnnnnnnnnnnnnnnnnnnnnnnnnnnnnnnnnnnnnnnnnnnnnnnnnnnnnnnnnnnnnnnnnnnnnnnnnnnnnnnnnnnnnnnnnnnnnnnnnnnnnnnnnnnnnnnnnnnnnnnnnnnnnnnnnnnnnnnnnnnnnnnnnnnnnnnnnnnnnnnnnnnnnnnnnnnnnnnnnnnnnnnnnnnnnnnnnnnnnnnnnnnnnnnnnnnnnnnnnnnnnnnnnnnnnnnnnnnnnnnnnnnnnnnnnnnnnnnnnnnnnnnnnnnnnnnnnnnnnnnnnnnnnnnnnnnnnnnnnnnnnnnnnnnnnnnnnnnnnnnnnnnnnnnnnnnnnnnnnnnnnnnnnnnnnnnnnnnnnnnnnnnnnnnnnnnnnnnnnnnnnnnnnnnnnnnnnnnnnnnnnnnnnnnnnnnnnnnnnnnnnnnnnnnnnnnnnnnnnnnnnnnnnnnnnnnnnnnnnnnnnnnnnnnnnnnnnnnnnnnnnnnnnnnnnnnnnnnnnnnnnnnnnnnnnnnnnnnnnnnnnnnnnnnnnnnnnnnnnnnnnnnnnnnnnnnnnnnnnnnnnnnnnnnnnnnnnnnnnnnnnnnnnnnnnnnnnnnnnnnnnnnnnnnnnnnnnnnnnnnnnnnnnnnnnnnnnnnnnnnnnnnnnnnnnnnnnnnnnnnnnnnnnnnnnnnnnnnnnnnnnnnnnnnnnnnnnnnnnnnnnnnnnnnnnnnnnnnnnnnnnnnnnnnnnnnnnnnnnnnnnnnnnnnnnnnnnnnnnnnnnnnnnnnnnnnnnnnnnnnnnnnnnnnnnnnnnnnnnnnnnnnnnnnnnnnnnnnnnnnnnnnnnnnnnnnnnnnnnnnnnnnnnnnnnnnnnnnnnnnnnnnnnnnnnnnnnnnnnnnnnnnnnnnnnnnnnnnnnnnnnnnnnnnnnnnnnnnnnnnnnnnnnnnnnnnnnnnnnnnnnnnnnnnnnnnnnnnnnnnnnnnnnnnnnnnnnnnnnnnnnnnnnnnnnnnnnnnnnnnnnnnnnnnnnnnnnnnnnnnnnnnnnnnnnnnnnnnnnnnnnnnnnnnnnnnnnnnnnnnnnnnnnnnnnnnnnnnnnnnnnnnnnnnnnnnnnnnnnnnnnnnnnnnnnnnnnnnnnnnnnnnnnnnnnnnnnnnnnnnnnnnnnnnnnnnnnnnnnnnnnnnnnnnnnnnnnnnnnnnnnnnnnnnnnnnnnnnnnnnnnnnnnnnnnnnnnnnnnnnnnnnnnnnnnnnnnnnnnnnnnnnnnnnnnnnnnnnnnnnnnnnnnnnnnnnnnnnnnnnnnnnnnnnnnnnnnnnnnnnnnnnnnnnnnnnnnnnnnnnnnnnnnnnnnnnnnnnnnnnnnnnnnnnnnnnnnnnnnnnnnnnnnnnnnnnnnnnnnnnnnnnnnnnnnnnnnnnnnnnnnnnnnnnnnnnnnnnnnnnnnnnnnnnnnnnnnnnnnnnnnnnnnnnnnnnnnnnnnnnnnnnnnnnnnnnnnnnnnnnnnnnnnnnnnnnnnnnnnnnnnnnnnnnnnnnnnnnnnnnnnnnnnnnnnnnnnnnnnnnnnnnnnnnnnnnnnnnnnnnnnnnnnnnnnnnnnnnnnnnnnnnnnnnnnnnnnnnnnnnnnnnnnnnnnnnnnnnnnnnnnnnnnnnnnnnnnnnnnnnnnnnnnnnnnnnnnnnnnnnnnnnnnnnnnnnnnnnnnnnnnnnnnnnnnnnnnnnnnnnnnnnnnnnnnnnnnnnnnnnnnnnnnnnnnnnnnnnnnnnnnnnnnnnnnnnnnnnnnnnnnnnnnnnnnnnnnnnnnnnnnnnnnnnnnnnnnnnnnnnnnnnnnnnnnnnnnnnnnnnnnnnnnnnnnnnnnnnnnnnnnnnnnnnnnnnnnnnnnnnnnnnnnnnnnnnnnnnnnnnnnnnnnnnnnnnnnnnnnnnnnnnnnnnnnnnnnnnnnnnnnnnnnnnnnnnnnnnnnnnnnnnnnnnnnnnnnnnnnnnnnnnnnnnnnnnnnnnnnnnnnnnnnnnnnnnnnnnnnnnnnnnnnnnnnnnnnnnnnnnnnnnnnnnnnnnnnnnnnnnnnnnnnnnnnnnnnnnnnnnnnnnnnnnnnnnnnnnnnnnnnnnnnnnnnnnnnnnnnnnnnnnnnnnnnnnnnnnnnnnnnnnnnnnnnnnnnnnnnnnnnnnnnnnnnnnnnnnnnnnnnnnnnnnnnnnnnnnnnnnnnnnnnnnnnnnnnnnnnnnnnnnnnnnnnnnnnnnnnnnnnnnnnnnnnnnnnnnnnnnnnnnnnnnnnnnnnnnnnnnnnnnnnnnnnnnnnnnnnnnnnnnnnnnnnnnnnnnnnnnnnnnnnnnnnnnnnnnnnnnnnnnnnnnnnnnnnnnnnnnnnnnnnnnnnnnnnnnnnnnnnnnnnnnnnnnnnnnnnnnnnnnnnnnnnnnnnnnnnnnnnnnnnnnnnnnnnnnnnnnnnnnnnnnnnnnnnnnnnnnnnnnnnnnnnnnnnnnnnnnnnnnnnnnnnnnnnnnnnnnnnnnnnnnnnnnnnnnnnnnnnnnnnnnnnnnnnnnnnnnnnnnnnnnnnnnnnnnnnnnnnnnnnnnnnnnnnnnnnnnnnnnnnnnnnnnnnnnnnnnnnnnnnnnnnnnnnnnnnnnnnnnnnnnnnnnnnnnnnnnnnnnnnnnnnnnnnnnnnnnnnnnnnnnnnnnnnnnnnnnnnnnnnnnnnnnnnnnnnnnnnnnnnnnnnnnnnnnnnnnnnnnnnnnnnnnnnnnnnnnnnnnnnnnnnnnnnnnnnnnnnnnnnnnnnnnnnnnnnnnnnnnnnnnnnnnnnnnnnnnnnnnnnnnnnnnnnnnnnnnnnnnnnnnnnnnnnnnnnnnnnnnnnnnnnnnnnnnnnnnnnnnnnnnnnnnnnnnnnnnnnnnnnnnnnnnnnnnnnnnnnnnnnnnnnnnnnnnnnnnnnnnnnnnnnnnnnnnnnnnnnnnnnnnnnnnnnnnnnnnnnnnnnnnnnnnnnnnnnnnnnnnnnnnnnnnnnnnnnnnnnnnnnnnnnnnnnnnnnnnnnnnnnnnnnnnnnnnnnnnnnnnnnnnnnnnnnnnnnnnnnnnnnnnnnnnnnnnnnnnnnnnnnnnnnnnnnnnnnnnnnnnnnnnnnnnnnnnnnnnnnnnnnnnnnnnnnnnnnnnnnnnnnnnnnnnnnnnnnnnnnnnnnnnnnnnnnnnnnnnnnnnnnnnnnnnnnnnnnnnnnnnnnnnnnnnnnnnnnnnnnnnnnnnnnnnnnnnnnnnnnnnnnnnnnnnnnnnnnnnnnnnnnnnnnnnnnnnnnnnnnnnnnnnnnnnnnnnnnnnnnnnnnnnnnnnnnnnnnnnnnnnnnnnnnnnnnnnnnnnnnnnnnnnnnnnnnnnnnnnnnnnnnnnnnnnnnnnnnnnnnnnnnnnnnnnnnnnnnnnnnnnnnnnnnnnnnnnnnnnnnnnnnnnnnnnnnnnnnnnnnnnnnnnnnnnnnnnnnnnnnnnnnnnnnnnnnnnnnnnnnnnnnnnnnnnnnnnnnnnnnnnnnnnnnnnnnnnnnnnnnnnnnnnnnnnnnnnnnnnnnnnnnnnnnnnnnnnnnnnnnnnnnnnnnnnnnnnnnnnnnnnnnnnnnnnnnnnnnnnnnnnnnnnnnnnnnnnnnnnnnnnnnnnnnnnnnnnnnnnnnnnnnnnnnnnnnnnnnnnnnnnnnnnnnnnnnnnnnnnnnnnnnnnnnnnnnnnnnnnnnnnnnnnnnnnnnnnnnnnnnnnnnnnnnnnnnnnnnnnnnnnnnnnnnnnnnnnnnnnnnnnnnnnnnnnnnnnnnnnnnnnnnnnnnnnnnnnnnnnnnnnnnnnnnnnnnnnnnnnnnnnnnnnnnnnnnnnnnnnnnnnnnnnnnnnnnnnnnnnnnnnnnnnnnnnnnnnnnnnnnnnnnnnnnnnnnnnnnnnnnnnnnnnnnnnnnnnnnnnnnnnnnnnnnnnnnnnnnnnnnnnnnnnnnnnnnnnnnnnnnnnnnnnnnnnnnnnnnnnnnnnnnnnnnnnnnnnnnnnnnnnnnnnnnnnnnnnnnnnnnnnnnnnnnnnnnnnnnnnnnnnnnnnnnnnnnnnnnnnnnnnnnnnnnnnnnnnnnnnnnnnnnnnnnnnnnnnnnnnnnnnnnnnnnnnnnnnnnnnnnnnnnnnnnnnnnnnnnnnnnnnnnnnnnnnnnnnnnnnnnnnnnnnnnnnnnnnnnnnnnnnnnnnnnnnnnnnnnnnnnnnnnnnnnnnnnnnnnnnnnnnnnnnnnnnnnnnnnnnnnnnnnnnnnnnnnnnnnnnnnnnnnnnnnnnnnnnnnnnnnnnnnnnnnnnnnnnnnnnnnnnnnnnnnnnnnnnnnnnnnnnnnnnnnnnnnnnnnnnnnnnnnnnnnnnnnnnnnnnnnnnnnnnnnnnnnnnnnnnnnnnnnnnnnnnnnnnnnnnnnnnnnnnnnnnnnnnnnnnnnnnnnnnnnnnnnnnnnnnnnnnnnnnnnnnnnnnnnnnnnnnnnnnnnnnnnnnnnnnnnnnnnnnnnnnnnnnnnnnnnnnnnnnnnnnnnnnnnnnnnnnnnnnnnnnnnnnnnnnnnnnnnnnnnnnnnnnnnnnnnnnnnnnnnnnnnnnnnnnnnnnnnnnnnnnnnnnnnnnnnnnnnnnnnnnnnnnnnnnnnnnnnnnnnnnnnnnnnnnnnnnnnnnnnnnnnnnnnnnnnnnnnnnnnnnnnnnnnnnnnnnnnnnnnnnnnnnnnnnnnnnnnnnnnnnnnnnnnnnnnnnnnnnnnnnnnnnnnnnnnnnnnnnnnnnnnnnnnnnnnnnnnnnnnnnnnnnnnnnnnnnnnnnnnnnnnnnnnnnnnnnnnnnnnnnnnnnnnnnnnnnnnnnnnnnnnnnnnnnnnnnnnnnnnnnnnnnnnnnnnnnnnnnnnnnnnnnnnnnnnnnnnnnnnnnnnnnnnnnnnnnnnnnnnnnnnnnnnnnnnnnnnnnnnnnnnnnnnnnnnnnnnnnnnnnnnnnnnnnnnnnnnnnnnnnnnnnnnnnnnnnnnnnnnnnnnnnnnnnnnnnnnnnnnnnnnnnnnnnnnnnnnnnnnnnnnnnnnnnnnnnnnnnnnnnnnnnnnnnnnnnnnnnnnnnnnnnnnnnnnnnnnnnnnnnnnnnnnnnnnnnnnnnnnnnnnnnnnnnnnnnnnnnnnnnnnnnnnnnnnnnnnnnnnnnnnnnnnnnnnnnnnnnnnnnnnnnnnnnnnnnnnnnnnnnnnnnnnnnnnnnnnnnnnnnnnnnnnnnnnnnnnnnnnnnnnnnnnnnnnnnnnnnnnnnnnnnnnnnnnnnnnnnnnnnnnnnnnnnnnnnnnnnnnnnnnnnnnnnnnnnnnnnnnnnnnnnnnnnnnnnnnnnnnnnnnnnnnnnnnnnnnnnnnnnnnnnnnnnnnnnnnnnnnnnnnnnnnnnnnnnnnnnnnnnnnnnnnnnnnnnnnnnnnnnnnnnnnnnnnnnnnnnnnnnnnnnnnnnnnnnnnnnnnnnnnnnnnnnnnnnnnnnnnnnnnnnnnnnnnnnnnnnnnnnnnnnnnnnnnnnnnnnnnnnnnnnnnnnnnnnnnnnnnnnnnnnnnnnnnnnnnnnnnnnnnnnnnnnnnnnnnnnnnnnnnnnnnnnnnnnnnnnnnnnnnnnnnnnnnnnnnnnnnnnnnnnnnnnnnnnnnnnnnnnnnnnnnnnnnnnnnnnnnnnnnnnnnnnnnnnnnnnnnnnnnnnnnnnnnnnnnnnnnnnnnnnnnnnnnnnnnnnnnnnnnnnnnnnnnnnnnnnnnnnnnnnnnnnnnnnnnnnnnnnnnnnnnnnnnnnnnnnnnnnnnnnnnnnnnnnnnnnnnnnnnnnnnnnnnnnnnnnnnnnnnnnnnnnnnnnnnnnnnnnnnnnnnnnnnnnnnnnnnnnnnnnnnnnnnnnnnnnnnnnnnnnnnnnnnnnnnnnnnnnnnnnnnnnnnnnnnnnnnnnnnnnnnnnnnnnnnnnnnnnnnnnnnnnnnnnnnnnnnnnnnnnnnnnnnnnnnnnnnnnnnnnnnnnnnnnnnnnnnnnnnnnnnnnnnnnnnnnnnnnnnnnnnnnnnnnnnnnnnnnnnnnnnnnnnnnnnnnnnnnnnnnnnnnnnnnnnnnnnnnnnnnnnnnnnnnnnnnnnnnnnnnnnnnnnnnnnnnnnnnnnnnnnnnnnnnnnnnnnnnnnnnnnnnnnnnnnnnnnnnnnnnnnnnnnnnnnnnnnnnnnnnnnnnnnnnnnnnnnnnnnnnnnnnnnnnnnnnnnnnnnnnnnnnnnnnnnnnnnnnnnnnnnnnnnnnnnnnnnnnnnnnnnnnnnnnnnnnnnnnnnnnnnnnnnnnnnnnnnnnnnnnnnnnnnnnnnnnnnnnnnnnnnnnnnnnnnnnnnnnnnnnnnnnnnnnnnnnnnnnnnnnnnnnnnnnnnnnnnnnnnnnnnnnnnnnnnnnnnnnnnnnnnnnnnnnnnnnnnnnnnnnnnnnnnnnnnnnnnnnnnnnnnnnnnnnnnnnnnnnnnnnnnnnnnnnnnnnnnnnnnnnnnnnnnnnnnnnnnnnnnnnnnnnnnnnnnnnnnnnnnnnnnnnnnnnnnnnnnnnnnnnnnnnnnnnnnnnnnnnnnnnnnnnnnnnnnnnnnnnnnnnnnnnnnnnnnnnnnnnnnnnnnnnnnnnnnnnnnnnnnnnnnnnnnnnnnnnnnnnnnnnnnnnnnnnnnnnnnnnnnnnnnnnnnnnnnnnnnnnnnnnnnnnnnnnnnnnnnnnnnnnnnnnnnnnnnnnnnnnnnnnnnnnnnnnnnnnnnnnnnnnnnnnnnnnnnnnnnnnnnnnnnnnnnnnnnnnnnnnnnnnnnnnnnnnnnnnnnnnnnnnnnnnnnnnnnnnnnnnnnnnnnnnnnnnnnnnnnnnnnnnnnnnnnnnnnnnnnnnnnnnnnnnnnnnnnnnnnnnnnnnnnnnnnnnnnnnnnnnnnnnnnnnnnnnnnnnnnnnnnnnnnnnnnnnnnnnnnnnnnnnnnnnnnnnnnnnnnnnnnnnnnnnnnnnnnnnnnnnnnnnnnnnnnnnnnnnnnnnnnnnnnnnnnnnnnnnnnnnnnnnnnnnnnnnnnnnnnnnnnnnnnnnnnnnnnnnnnnnnnnnnnnnnnnnnnnnnnnnnnnnnnnnnnnnnnnnnnnnnnnnnnnnnnnnnnnnnnnnnnnnnnnnnnnnnnnnnnnnnnnnnnnnnnnnnnnnnnnnnnnnnnnnnnnnnnnnnnnnnnnnnnnnnnnnnnnnnnnnnnnnnnnnnnnnnnnnnnnnnnnnnnnnnnnnnnnnnnnnnnnnnnnnnnnnnnnnnnnnnnnnnnnnnnnnnnnnnnnnnnnnnnnnnnnnnnnnnnnnnnnnnnnnnnnnnnnnnnnnnnnnnnnnnnnnnnnnnnnnnnnnnnnnnnnnnnnnnnnnnnnnnnnnnnnnnnnnnnnnnnnnnnnnnnnnnnnnnnnnnnnnnnnnnnnnnnnnnnnnnnnnnnnnnnnnnnnnnnnnnnnnnnnnnnnnnnnnnnnnnnnnnnnnnnnnnnnnnnnnnnnnnnnnnnnnnnnnnnnnnnnnnnnnnnnnnnnnnnnnnnnnnnnnnnnnnnnnnnnnnnnnnnnnnnnnnnnnnnnnnnnnnnnnnnnnnnnnnnnnnnnnnnnnnnnnnnnnnnnnnnnnnnnnnnnnnnnnnnnnnnnnnnnnnnnnnnnnnnnnnnnnnnnnnnnnnnnnnnnnnnnnnnnnnnnnnnnnnnnnnnnnnnnnnnnnnnnnnnnnnnnnnnnnnnnnnnnnnnnnnnnnnnnnnnnnnnnnnnnnnnnnnnnnnnnnnnnnnnnnnnnnnnnnnnnnnnnnnnnnnnnnnnnnnnnnnnnnnnnnnnnnnnnnnnnnnnnnnnnnnnnnnnnnnnnnnnnnnnnnnnnnnnnnnnnnnnnnnnnnnnnnnnnnnnnnnnnnnnnnnnnnnnnnnnnnnnnnnnnnnnnnnnnnnnnnnnnnnnnnnnnnnnnnnnnnnnnnnnnnnnnnnnnnnnnnnnnnnnnnnnnnnnnnnnnnnnnnnnnnnnnnnnnnnnnnnnnnnnnnnnnnnnnnnnnnnnnnnnnnnnnnnnnnnnnnnnnnnnnnnnnnnnnnnnnnnnnnnnnnnnnnnnnnnnnnnnnnnnnnnnnnnnnnnnnnnnnnnnnnnnnnnnnnnnnnnnnnnnnnnnnnnnnnnnnnnnnnnnnnnnnnnnnnnnnnnnnnnnnnnnnnnnnnnnnnnnnnnnnnnnnnnnnnnnnnnnnnnnnnnnnnnnnnnnnnnnnnnnnnnnnnnnnnnnnnnnnnnnnnnnnnnnnnnnnnnnnnnnnnnnnnnnnnnnnnnnnnnnnnnnnnnnnnnnnnnnnnnnnnnnnnnnnnnnnnnnnnnnnnnnnnnnnnnnnnnnnnnnnnnnnnnnnnnnnnnnnnnnnnnnnnnnnnnnnnnnnnnnnnnnnnnnnnnnnnnnnnnnnnnnnnnnnnnnnnnnnnnnnnnnnnnnnnnnnnnnnnnnnnnnnnnnnnnnnnnnnnnnnnnnnnnnnnnnnnnnnnnnnnnnnnnnnnnnnnnnnnnnnnnnnnnnnnnnnnnnnnnnnnnnnnnnnnnnnnnnnnnnnnnnnnnnnnnnnnnnnnnnnnnnnnnnnnnnnnnnnnnnnnnnnnnnnnnnnnnnnnnnnnnnnnnnnnnnnnnnnnnnnnnnnnnnnnnnnnnnnnnnnnnnnnnnnnnnnnnnnnnnnnnnnnnnnnnnnnnnnnnnnnnnnnnnnnnnnnnnnnnnnnnnnnnnnnnnnnnnnnnnnnnnnnnnnnnnnnnnnnnnnnnnnnnnnnnnnnnnnnnnnnnnnnnnnnnnnnnnnnnnnnnnnnnnnnnnnnnnnnnnnnnnnnnnnnnnnnnnnnnnnnnnnnnnnnnnnnnnnnnnnnnnnnnnnnnnnnnnnnnnnnnnnnnnnnnnnnnnnnnnnnnnnnnnnnnnnnnnnnnnnnnnnnnnnnnnnnnnnnnnnnnnnnnnnnnnnnnnnnnnnnnnnnnnnnnnnnnnnnnnnnnnnnnnnnnnnnnnnnnnnnnnnnnnnnnnnnnnnnnnnnnnnnnnnnnnnnnnnnnnnnnnnnnnnnnnnnnnnnnnnnnnnnnnnnnnnnnnnnnnnnnnnnnnnnnnnnnnnnnnnnnnnnnnnnnnnnnnnnnnnnnnnnnnnnnnnnnnnnnnnnnnnnnnnnnnnnnnnnnnnnnnnnnnnnnnnnnnnnnnnnnnnnnnnnnnnnnnnnnnnnnnnnnnnnnnnnnnnnnnnnnnnnnnnnnnnnnnnnnnnnnnnnnnnnnnnnnnnnnnnnnnnnnnnnnnnnnnnnnnnnnnnnnnnnnnnnnnnnnnnnnnnnnnnnnnnnnnnnnnnnnnnnnnnnnnnnnnnnnnnnnnnnnnnnnnnnnnnnnnnnnnnnnnnnnnnnnnnnnnnnnnnnnnnnnnnnnnnnnnnnnnnnnnnnnnnnnnnnnnnnnnnnnnnnnnnnnnnnnnnnnnnnnnnnnnnnnnnnnnnnnnnnnnnnnnnnnnnnnnnnnnnnnnnnnnnnnnnnnnnnnnnnnnnnnnnnnnnnnnnnnnnnnnnnnnnnnnnnnnnnnnnnnnnnnnnnnnnnnnnnnnnnnnnnnnnnnnnnnnnnnnnnnnnnnnnnnnnnnnnnnnnnnnnnnnnnnnnnnnnnnnnnnnnnnnnnnnnnnnnnnnnnnnnnnnnnnnnnnnnnnnnnnnnnnnnnnnnnnnnnnnnnnnnnnnnnnnnnnnnnnnnnnnnnnnnnnnnnnnnnnnnnnnnnnnnnnnnnnnnnnnnnnnnnnnnnnnnnnnnnnnnnnnnnnnnnnnnnnnnnnnnnnnnnnnnnnnnnnnnnnnnnnnnnnnnnnnnnnnnnnnnnnnnnnnnnnnnnnnnnnnnnnnnnnnnnnnnnnnnnnnnnnnnnnnnnnnnnnnnnnnnnnnnnnnnnnnnnnnnnnnnnnnnnnnnnnnnnnnnnnnnnnnnnnnnnnnnnnnnnnnnnnnnnnnnnnnnnnnnnnnnnnnnnnnnnnnnnnnnnnnnnnnnnnnnnnnnnnnnnnnnnnnnnnnnnnnnnnnnnnnnnnnnnnnnnnnnnnnnnnnnnnnnnnnnnnnnnnnnnnnnnnnnnnnnnnnnnnnnnnnnnnnnnnnnnnnnnnnnnnnnnnnnnnnnnnnnnnnnnnnnnnnnnnnnnnnnnnnnnnnnnnnnnnnnnnnnnnnnnnnnnnnnnnnnnnnnnnnnnnnnnnnnnnnnnnnnnnnnnnnnnnnnnnnnnnnnnnnnnnnnnnnnnnnnnnnnnnnnnnnnnnnnnnnnnnnnnnnnnnnnnnnnnnnnnnnnnnnnnnnnnnnnnnnnnnnnnnnnnnnnnnnnnnnnnnnnnnnnnnnnnnnnnnnnnnnnnnnnnnnnnnnnnnnnnnnnnnnnnnnnnnnnnnnnnnnnnnnnnnnnnnnnnnnnnnnnnnnnnnnnnnnnnnnnnnnnnnnnnnnnnnnnnnnnnnnnnnnnnnnnnnnnnnnnnnnnnnnnnnnnnnnnnnnnnnnnnnnnnnnnnnnnnnnnnnnnnnnnnnnnnnnnnnnnnnnnnnnnnnnnnnnnnnnnnnnnnnnnnnnnnnnnnnnnnnnnnnnnnnnnnnnnnnnnnnnnnnnnnnnnnnnnnnnnnnnnnnnnnnnnnnnnnnnnnnnnnnnnnnnnnnnnnnnnnnnnnnnnnnnnnnnnnnnnnnnnnnnnnnnnnnnnnnnnnnnnnnnnnnnnnnnnnnnnnnnnnnnnnnnnnnnnnnnnnnnnnnnnnnnnnnnnnnnnnnnnnnnnnnnnnnnnnnnnnnnnnnnnnnnnnnnnnnnnnnnnnnnnnnnnnnnnnnnnnnnnnnnnnnnnnnnnnnnnnnnnnnnnnnnnnnnnnnnnnnnnnnnnnnnnnnnnnnnnnnnnnnnnnnnnnnnnnnnnnnnnnnnnnnnnnnnnnnnnnnnnnnnnnnnnnnnnnnnnnnnnnnnnnnnnnnnnnnnnnnnnnnnnnnnnnnnnnnnnnnnnnnnnnnnnnnnnnnnnnnnnnnnnnnnnnnnnnnnnnnnnnnnnnnnnnnnnnnnnnnnnnnnnnnnnnnnnnnnnnnnnnnnnnnnnnnnnnnnnnnnnnnnnnnnnnnnnnnnnnnnnnnnnnnnnnnnnnnnnnnnnnnnnnnnnnnnnnnnnnnnnnnnnnnnnnnnnnnnnnnnnnnnnnnnnnnnnnnnnnnnnnnnnnnnnnnnnnnnnnnnnnnnnnnnnnnnnnnnnnnnnnnnnnnnnnnnnnnnnnnnnnnnnnnnnnnnnnnnnnnnnnnnnnnnnnnnnnnnnnnnnnnnnnnnnnnnnnnnnnnnnnnnnnnnnnnnnnnnnnnnnnnnnnnnnnnnnnnnnnnnnnnnnnnnnnnnnnnnnnnnnnnnnnnnnnnnnnnnnnnnnnnnnnnnnnnnnnnnnnnnnnnnnnnnnnnnnnnnnnnnnnnnnnnnnnnnnnnnnnnnnnnnnnnnnnnnnnnnnnnnnnnnnnnnnnnnnnnnnnnnnnnnnnnnnnnnnnnnnnnnnnnnnnnnnnnnnnnnnnnnnnnnnnnnnnnnnnnnnnnnnnnnnnnnnnnnnnnnnnnnnnnnnnnnnnnnnnnnnnnnnnnnnnnnnnnnnnnnnnnnnnnnnnnnnnnnnnnnnnnnnnnnnnnnnnnnnnnnnnnnnnnnnnnnnnnnnnnnnnnnnnnnnnnnnnnnnnnnnnnnnnnnnnnnnnnnnnnnnnnnnnnnnnnnnnnnnnnnnnnnnnnnnnnnnnnnnnnnnnnnnnnnnnnnnnnnnnnnnnnnnnnnnnnnnnnnnnnnnnnnnnnnnnnnnnnnnnnnnnnnnnnnnnnnnnnnnnnnnnnnnnnnnnnnnnnnnnnnnnnnnnnnnnnnnnnnnnnnnnnnnnnnnnnnnnnnnnnnnnnnnnnnnnnnnnnnnnnnnnnnnnnnnnnnnnnnnnnnnnnnnnnnnnnnnnnnnnnnnnnnnnnnnnnnnnnnnnnnnnnnnnnnnnnnnnnnnnnnnnnnnnnnnnnnnnnnnnnnnnnnnnnnnnnnnnnnnnnnnnnnnnnnnnnnnnnnnnnnnnnnnnnnnnnnnnnnnnnnnnnnnnnnnnnnnnnnnnnnnnnnnnnnnnnnnnnnnnnnnnnnnnnnnnnnnnnnnnnnnnnnnnnnnnnnnnnnnnnnnnnnnnnnnnnnnnnnnnnnnnnnnnnnnnnnnnnnnnnnnnnnnnnnnnnnnnnnnnnnnnnnnnnnnnnnnnnnnnnnnnnnnnnnnnnnnnnnnnnnnnnnnnnnnnnnnnnnnnnnnnnnnnnnnnnnnnnnnnnnnnnnnnnnnnnnnnnnnnnnnnnnnnnnnnnnnnnnnnnnnnnnnnnnnnnnnnnnnnnnnnnnnnnnnnnnnnnnnnnnnnnnnnnnnnnnnnnnnnnnnnnnnnnnnnnnnnnnnnnnnnnnnnnnnnnnnnnnnnnnnnnnnnnnnnnnnnnnnnnnnnnnnnnnnnnnnnnnnnnnnnnnnnnnnnnnnnnnnnnnnnnnnnnnnnnnnnnnnnnnnnnnnnnnnnnnnnnnnnnnnnnnnnnnnnnnnnnnnnnnnnnnnnnnnnnnnnnnnnnnnnnnnnnnnnnnnnnnnnnnnnnnnnnnnnnnnnnnnnnnnnnnnnnnnnnnnnnnnnnnnnnnnnnnnnnnnnnnnnnnnnnnnnnnnnnnnnnnnnnnnnnnnnnnnnnnnnnnnnnnnnnnnnnnnnnnnnnnnnnnnnnnnnnnnnnnnnnnnnnnnnnnnnnnnnnnnnnnnnnnnnnnnnnnnnnnnnnnnnnnnnnnnnnnnnnnnnnnnnnnnnnnnnnnnnnnnnnnnnnnnnnnnnnnnnnnnnnnnnnnnnnnnnnnnnnnnnnnnnnnnnnnnnnnnnnnnnnnnnnnnnnnnnnnnnnnnnnnnnnnnnnnnnnnnnnnnnnnnnnnnnnnnnnnnnnnnnnnnnnnnnnnnnnnnnnnnnnnnnnnnnnnnnnnnnnnnnnnnnnnnnnnnnnnnnnnnnnnnnnnnnnnnnnnnnnnnnnnnnnnnnnnnnnnnnnnnnnnnnnnnnnnnnnnnnnnnnnnnnnnnnnnnnnnnnnnnnnnnnnnnnnnnnnnnnnnnnnnnnnnnnnnnnnnnnnnnnnnnnnnnnnnnnnnnnnnnnnnnnnnnnnnnnnnnnnnnnnnnnnnnnnnnnnnnnnnnnnnnnnnnnnnnnnnnnnnnnnnnnnnnnnnnnnnnnnnnnnnnnnnnnnnnnnnnnnnnnnnnnnnnnnnnnnnnnnnnnnnnnnnnnnnnnnnnnnnnnnnnnnnnnnnnnnnnnnnnnnnnnnnnnnnnnnnnnnnnnnnnnnnnnnnnnnnnnnnnnnnnnnnnnnnnnnnnnnnnnnnnnnnnnnnnnnnnnnnnnnnnnnnnnnnnnnnnnnnnnnnnnnnnnnnnnnnnnnnnnnnnnnnnnnnnnnnnnnnnnnnnnnnnnnnnnnnnnnnnnnnnnnnnnnnnnnnnnnnnnnnnnnnnnnnnnnnnnnnnnnnnnnnnnnnnnnnnnnnnnnnnnnnnnnnnnnnnnnnnnnnnnnnnnnnnnnnnnnnnnnnnnnnnnnnnnnnnnnnnnnnnnnnnnnnnnnnnnnnnnnnnnnnnnnnnnnnnnnnnnnnnnnnnnnnnnnnnnnnnnnnnnnnnnnnnnnnnnnnnnnnnnnnnnnnnnnnnnnnnnnnnnnnnnnnnnnnnnnnnnnnnnnnnnnnnnnnnnnnnnnnnnnnnnnnnnnnnnnnnnnnnnnnnnnnnnnnnnnnnnnnnnnnnnnnnnnnnnnnnnnnnnnnnnnnnnnnnnnnnnnnnnnnnnnnnnnnnnnnnnnnnnnnnnnnnnnnnnnnnnnnnnnnnnnnnnnnnnnnnnnnnnnnnnnnnnnnnnnnnnnnnnnnnnnnnnnnnnnnnnnnnnnnnnnnnnnnnnnnnnnnnnnnnnnnnnnnnnnnnnnnnnnnnnnnnnnnnnnnnnnnnnnnnnnnnnnnnnnnnnnnnnnnnnnnnnnnnnnnnnnnnnnnnnnnnnnnnnnnnnnnnnnnnnnnnnnnnnnnnnnnnnnnnnnnnnnnnnnnnnnnnnnnnnnnnnnnnnnnnnnnnnnnnnnnnnnnnnnnnnnnnnnnnnnnnnnnnnnnnnnnnnnnnnnnnnnnnnnnnnnnnnnnnnnnnnnnnnnnnnnnnnnnnnnnnnnnnnnnnnnnnnnnnnnnnnnnnnnnnnnnnnnnnnnnnnnnnnnnnnnnnnnnnnnnnnnnnnnnnnnnnnnnnnnnnnnnnnnnnnnnnnnnnnnnnnnnnnnnnnnnnnnnnnnnnnnnnnnnnnnnnnnnnnnnnnnnnnnnnnnnnnnnnnnnnnnnnnnnnnnnnnnnnnnnnnnnnnnnnnnnnnnnnnnnnnnnnnnnnnnnnnnnnnnnnnnnnnnnnnnnnnnnnnnnnnnnnnnnnnnnnnnnnnnnnnnnnnnnnnnnnnnnnnnnnnnnnnnnnnnnnnnnnnnnnnnnnnnnnnnnnnnnnnnnnnnnnnnnnnnnnnnnnnnnnnnnnnnnnnnnnnnnnnnnnnnnnnnnnnnnnnnnnnnnnnnnnnnnnnnnnnnnnnnnnnnnnnnnnnnnnnnnnnnnnnnnnnnnnnnnnnnnnnnnnnnnnnnnnnnnnnnnnnnnnnnnnnnnnnnnnnnnnnnnnnnnnnnnnnnnnnnnnnnnnnnnnnnnnnnnnnnnnnnnnnnnnnnnnnnnnnnnnnnnnnnnnnnnnnnnnnnnnnnnnnnnnnnnnnnnnnnnnnnnnnnnnnnnnnnnnnnnnnnnnnnnnnnnnnnnnnnnnnnnnnnnnnnnnnnnnnnnnnnnnnnnnnnnnnnnnnnnnnnnnnnnnnnnnnnnnnnnnnnnnnnnnnnnnnnnnnnnnnnnnnnnnnnnnnnnnnnnnnnnnnnnnnnnnnnnnnnnnnnnnnnnnnnnnnnnnnnnnnnnnnnnnnnnnnnnnnnnnnnnnnnnnnnnnnnnnnnnnnnnnnnnnnnnnnnnnnnnnnnnnnnnnnnnnnnnnnnnnnnnnnnnnnnnnnnnnnnnnnnnnnnnnnnnnnnnnnnnnnnnnnnnnnnnnnnnnnnnnnnnnnnnnnnnnnnnnnnnnnnnnnnnnnnnnnnnnnnnnnnnnnnnnnnnnnnnnnnnnnnnnnnnnnnnnnnnnnnnnnnnnnnnnnnnnnnnnnnnnnnnnnnnnnnnnnnnnnnnnnnnnnnnnnnnnnnnnnnnnnnnnnnnnnnnnnnnnnnnnnnnnnnnnnnnnnnnnnnnnnnnnnnnnnnnnnnnnnnnnnnnnnnnnnnnnnnnnnnnnnnnnnnnnnnnnnnnnnnnnnnnnnnnnnnnnnnnnnnnnnnnnnnnnnnnnnnnnnnnnnnnnnnnnnnnnnnnnnnnnnnnnnnnnnnnnnnnnnnnnnnnnnnnnnnnnnnnnnnnnnnnnnnnnnnnnnnnnnnnnnnnnnnnnnnnnnnnnnnnnnnnnnnnnnnnnnnnnnnnnnnnnnnnnnnnnnnnnnnnnnnnnnnnnnnnnnnnnnnnnnnnnnnnnnnnnnnnnnnnnnnnnnnnnnnnnnnnnnnnnnnnnnnnnnnnnnnnnnnnnnnnnnnnnnnnnnnnnnnnnnnnnnnnnnnnnnnnnnnnnnnnnnnnnnnnnnnnnnnnnnnnnnnnnnnnnnnnnnnnnnnnnnnnnnnnnnnnnnnnnnnnnnnnnnnnnnnnnnnnnnnnnnnnnnnnnnnnnnnnnnnnnnnnnnnnnnnnnnnnnnnnnnnnnnnnnnnnnnnnnnnnnnnnnnnnnnnnnnnnnnnnnnnnnnnnnnnnnnnnnnnnnnnnnnnnnnnnnnnnnnnnnnnnnnnnnnnnnnnnnnnnnnnnnnnnnnnnnnnnnnnnnnnnnnnnnnnnnnnnnnnnnnnnnnnnnnnnnnnnnnnnnnnnnnnnnnnnnnnnnnnnnnnnnnnnnnnnnnnnnnnnnnnnnnnnnnnnnnnnnnnnnnnnnnnnnnnnnnnnnnnnnnnnnnnnnnnnnnnnnnnnnnnnnnnnnnnnnnnnnnnnnnnnnnnnnnnnnnnnnnnnnnnnnnnnnnnnnnnnnnnnnnnnnnnnnnnnnnnnnnnnnnnnnnnnnnnnnnnnnnnnnnnnnnnnnnnnnnnnnnnnnnnnnnnnnnnnnnnnnnnnnnnnnnnnnnnnnnnnnnnnnnnnnnnnnnnnnnnnnnnnnnnnnnnnnnnnnnnnnnnnnnnnnnnnnnnnnnnnnnnnnnnnnnnnnnnnnnnnnnnnnnnnnnnnnnnnnnnnnnnnnnnnnnnnnnnnnnnnnnnnnnnnnnnnnnnnnnnnnnnnnnnnnnnnnnnnnnnnnnnnnnnnnnnnnnnnnnnnnnnnnnnnnnnnnnnnnnnnnnnnnnnnnnnnnnnnnnnnnnnnnnnnnnnnnnnnnnnnnnnnnnnnnnnnnnnnnnnnnnnnnnnnnnnnnnnnnnnnnnnnnnnnnnnnnnnnnnnnnnnnnnnnnnnnnnnnnnnnnnnnnnnnnnnnnnnnnnnnnnnnnnnnnnnnnnnnnnnnnnnnnnnnnnnnnnnnnnnnnnnnnnnnnnnnnnnnnnnnnnnnnnnnnnnnnnnnnnnnnnnnnnnnnnnnnnnnnnnnnnnnnnnnnnnnnnnnnnnnnnnnnnnnnnnnnnnnnnnnnnnnnnnnnnnnnnnnnnnnnnnnnnnnnnnnnnnnnnnnnnnnnnnnnnnnnnnnnnnnnnnnnnnnnnnnnnnnnnnnnnnnnnnnnnnnnnnnnnnnnnnnnnnnnnnnnnnnnnnnnnnnnnnnnnnnnnnnnnnnnnnnnnnnnnnnnnnnnnnnnnnnnnnnnnnnnnnnnnnnnnnnnnnnnnnnnnnnnnnnnnnnnnnnnnnnnnnnnnnnnnnnnnnnnnnnnnnnnnnnnnnnnnnnnnnnnnnnnnnnnnnnnnnnnnnnnnnnnnnnnnnnnnnnnnnnnnnnnnnnnnnnnnnnnnnnnnnnnnnnnnnnnnnnnnnnnnnnnnnnnnnnnnnnnnnnnnnnnnnnnnnnnnnnnnnnnnnnnnnnnnnnnnnnnnnnnnnnnnnnnnnnnnnnnnnnnnnnnnnnnnnnnnnnnnnnnnnnnnnnnnnnnnnnnnnnnnnnnnnnnnnnnnnnnnnnnnnnnnnnnnnnnnnnnnnnnnnnnnnnnnnnnnnnnnnnnnnnnnnnnnnnnnnnnnnnnnnnnnnnnnnnnnnnnnnnnnnnnnnnnnnnnnnnnnnnnnnnnnnnnnnnnnnnnnnnnnnnnnnnnnnnnnnnnnnnnnnnnnnnnnnnnnnnnnnnnnnnnnnnnnnnnnnnnnnnnnnnnnnnnnnnnnnnnnnnnnnnnnnnnnnnnnnnnnnnnnnnnnnnnnnnnnnnnnnnnnnnnnnnnnnnnnnnnnnnnnnnnnnnnnnnnnnnnnnnnnnnnnnnnnnnnnnnnnnnnnnnnnnnnnnnnnnnnnnnnnnnnnnnnnnnnnnnnnnnnnnnnnnnnnnnnnnnnnnnnnnnnnnnnnnnnnnnnnnnnnnnnnnnnnnnnnnnnnnnnnnnnnnnnnnnnnnnnnnnnnnnnnnnnnnnnnnnnnnnnnnnnnnnnnnnnnnnnnnnnnnnnnnnnnnnnnnnnnnnnnnnnnnnnnnnnnnnnnnnnnnnnnnnnnnnnnnnnnnnnnnnnnnnnnnnnnnnnnnnnnnnnnnnnnnnnnnnnnnnnnnnnnnnnnnnnnnnnnnnnnnnnnnnnnnnnnnnnnnnnnnnnnnnnnnnnnnnnnnnnnnnnnnnnnnnnnnnnnnnnnnnnnnnnnnnnnnnnnnnnnnnnnnnnnnnnnnnnnnnnnnnnnnnnnnnnnnnnnnnnnnnnnnnnnnnnnnnnnnnnnnnnnnnnnnnnnnnnnnnnnnnnnnnnnnnnnnnnnnnnnnnnnnnnnnnnnnnnnnnnnnnnnnnnnnnnnnnnnnnnnnnnnnnnnnnnnnnnnnnnnnnnnnnnnnnnnnnnnnnnnnnnnnnnnnnnnnnnnnnnnnnnnnnnnnnnnnnnnnnnnnnnnnnnnnnnnnnnnnnnnnnnnnnnnnnnnnnnnnnnnnnnnnnnnnnnnnnnnnnnnnnnnnnnnnnnnnnnnnnnnnnnnnnnnnnnnnnnnnnnnnnnnnnnnnnnnnnnnnnnnnnnnnnnnnnnnnnnnnnnnnnnnnnnnnnnnnnnnnnnnnnnnnnnnnnnnnnnnnnnnnnnnnnnnnnnnnnnnnnnnnnnnnnnnnnnnnnnnnnnnnnnnnnnnnnnnnnnnnnnnnnnnnnnnnnnnnnnnnnnnnnnnnnnnnnnnnnnnnnnnnnnnnnnnnnnnnnnnnnnnnnnnnnnnnnnnnnnnnnnnnnnnnnnnnnnnnnnnnnnnnnnnnnnnnnnnnnnnnnnnnnnnnnnnnnnnnnnnnnnnnnnnnnnnnnnnnnnnnnnnnnnnnnnnnnnnnnnnnnnnnnnnnnnnnnnnnnnnnnnnnnnnnnnnnnnnnnnnnnnnnnnnnnnnnnnnnnnnnnnnnnnnnnnnnnnnnnnnnnnnnnnnnnnnnnnnnnnnnnnnnnnnnnnnnnnnnnnnnnnnnnnnnnnnnnnnnnnnnnnnnnnnnnnnnnnnnnnnnnnnnnnnnnnnnnnnnnnnnnnnnnnnnnnnnnnnnnnnnnnnnnnnnnnnnnnnnnnnnnnnnnnnnnnnnnnnnnnnnnnnnnnnnnnnnnnnnnnnnnnnnnnnnnnnnnnnnnnnnnnnnnnnnnnnnnnnnnnnnnnnnnnnnnnnnnnnnnnnnnnnnnnnnnnnnnnnnnnnnnnnnnnnnnnnnnnnnnnnnnnnnnnnnnnnnnnnnnnnnnnnnnnnnnnnnnnnnnnnnnnnnnnnnnnnnnnnnnnnnnnnnnnnnnnnnnnnnnnnnnnnnnnnnnnnnnnnnnnnnnnnnnnnnnnnnnnnnnnnnnnnnnnnnnnnnnnnnnnnnnnnnnnnnnnnnnnnnnnnnnnnnnnnnnnnnnnnnnnnnnnnnnnnnnnnnnnnnnnnnnnnnnnnnnnnnnnnnnnnnnnnnnnnnnnnnnnnnnnnnnnnnnnnnnnnnnnnnnnnnnnnnnnnnnnnnnnnnnnnnnnnnnnnnnnnnnnnnnnnnnnnnnnnnnnnnnnnnnnnnnnnnnnnnnnnnnnnnnnnnnnnnnnnnnnnnnnnnnnnnnnnnnnnnnnnnnnnnnnnnnnnnnnnnnnnnnnnnnnnnnnnnnnnnnnnnnnnnnnnnnnnnnnnnnnnnnnnnnnnnnnnnnnnnnnnnnnnnnnnnnnnnnnnnnnnnnnnnnnnnnnnnnnnnnnnnnnnnnnnnnnnnnnnnnnnnnnnnnnnnnnnnnnnnnnnnnnnnnnnnnnnnnnnnnnnnnnnnnnnnnnnnnnnnnnnnnnnnnnnnnnnnnnnnnnnnnnnnnnnnnnnnnnnnnnnnnnnnnnnnnnnnnnnnnnnnnnnnnnnnnnnnnnnnnnnnnnnnnnnnnnnnnnnnnnnnnnnnnnnnnnnnnnnnnnnnnnnnnnnnnnnnnnnnnnnnnnnnnnnnnnnnnnnnnnnnnnnnnnnnnnnnnnnnnnnnnnnnnnnnnnnnnnnnnnnnnnnnnnnnnnnnnnnnnnnnnnnnnnnnnnnnnnnnnnnnnnnnnnnnnnnnnnnnnnnnnnnnnnnnnnnnnnnnnnnnnnnnnnnnnnnnnnnnnnnnnnnnnnnnnnnnnnnnnnnnnnnnnnnnnnnnnnnnnnnnnnnnnnnnnnnnnnnnnnnnnnnnnnnnnnnnnnnnnnnnnnnnnnnnnnnnnnnnnnnnnnnnnnnnnnnnnnnnnnnnnnnnnnnnnnnnnnnnnnnnnnnnnnnnnnnnnnnnnnnnnnnnnnnnnnnnnnnnnnnnnnnnnnnnnnnnnnnnnnnnnnnnnnnnnnnnnnnnnnnnnnnnnnnnnnnnnnnnnnnnnnnnnnnnnnnnnnnnnnnnnnnnnnnnnnnnnnnnnnnnnnnnnnnnnnnnnnnnnnnnnnnnnnnnnnnnnnnnnnnnnnnnnnnnnnnnnnnnnnnnnnnnnnnnnnnnnnnnnnnnnnnnnnnnnnnnnnnnnnnnnnnnnnnnnnnnnnnnnnnnnnnnnnnnnnnnnnnnnnnnnnnnnnnnnnnnnnnnnnnnnnnnnnnnnnnnnnnnnnnnnnnnnnnnnnnnnnnnnnnnnnnnnnnnnnnnnnnnnnnnnnnnnnnnnnnnnnnnnnnnnnnnnnnnnnnnnnnnnnnnnnnnnnnnnnnnnnnnnnnnnnnnnnnnnnnnnnnnnnnnnnnnnnnnnnnnnnnnnnnnnnnnnnnnnnnnnnnnnnnnnnnnnnnnnnnnnnnnnnnnnnnnnnnnnnnnnnnnnnnnnnnnnnnnnnnnnnnnnnnnnnnnnnnnnnnnnnnnnnnnnnnnnnnnnnnnnnnnnnnnnnnnnnnnnnnnnnnnnnnnnnnnnnnnnnnnnnnnnnnnnnnnnnnnnnnnnnnnnnnnnnnnnnnnnnnnnnnnnnnnnnnnnnnnnnnnnnnnnnnnnnnnnnnnnnnnnnnnnnnnnnnnnnnnnnnnnnnnnnnnnnnnnnnnnnnnnnnnnnnnnnnnnnnnnnnnnnnnnnnnnnnnnnnnnnnnnnnnnnnnnnnnnnnnnnnnnnnnnnnnnnnnnnnnnnnnnnnnnnnnnnnnnnnnnnnnnnnnnnnnnnnnnnnnnnnnnnnnnnnnnnnnnnnnnnnnnnnnnnnnnnnnnnnnnnnnnnnnnnnnnnnnnnnnnnnnnnnnnnnnnnnnnnnnnnnnnnnnnnnnnnnnnnnnnnnnnnnnnnnnnnnnnnnnnnnnnnnnnnnnnnnnnnnnnnnnnnnnnnnnnnnnnnnnnnnnnnnnnnnnnnnnnnnnnnnnnnnnnnnnnnnnnnnnnnnnnnnnnnnnnnnnnnnnnnnnnnnnnnnnnnnnnnnnnnnnnnnnnnnnnnnnnnnnnnnnnnnnnnnnnnnnnnnnnnnnnnnnnnnnnnnnnnnnnnnnnnnnnnnnnnnnnnnnnnnnnnnnnnnnnnnnnnnnnnnnnnnnnnnnnnnnnnnnnnnnnnnnnnnnnnnnnnnnnnnnnnnnnnnnnnnnnnnnnnnnnnnnnnnnnnnnnnnnnnnnnnnnnnnnnnnnnnnnnnnnnnnnnnnnnnnnnnnnnnnnnnnnnnnnnnnnnnnnnnnnnnnnnnnnnnnnnnnnnnnnnnnnnnnnnnnnnnnnnnnnnnnnnnnnnnnnnnnnnnnnnnnnnnnnnnnnnnnnnnnnnnnnnnnnnnnnnnnnnnnnnnnnnnnnnnnnnnnnnnnnnnnnnnnnnnnnnnnnnnnnnnnnnnnnnnnnnnnnnnnnnnnnnnnnnnnnnnnnnnnnnnnnnnnnnnnnnnnnnnnnnnnnnnnnnnnnnnnnnnnnnnnnnnnnnnnnnnnnnnnnnnnnnnnnnnnnnnnnnnnnnnnnnnnnnnnnnnnnnnnnnnnnnnnnnnnnnnnnnnnnnnnnnnnnnnnnnnnnnnnnnnnnnnnnnnnnnnnnnnnnnnnnnnnnnnnnnnnnnnnnnnnnnnnnnnnnnnnnnnnnnnnnnnnnnnnnnnnnnnnnnnnnnnnnnnnnnnnnnnnnnnnnnnnnnnnnnnnnnnnnnnnnnnnnnnnnnnnnnnnnnnnnnnnnnnnnnnnnnnnnnnnnnnnnnnnnnnnnnnnnnnnnnnnnnnnnnnnnnnnnnnnnnnnnnnnnnnnnnnnnnnnnnnnnnnnnnnnnnnnnnnnnnnnnnnnnnnnnnnnnnnnnnnnnnnnnnnnnnnnnnnnnnnnnnnnnnnnnnnnnnnnnnnnnnnnnnnnnnnnnnnnnnnnnnnnnnnnnnnnnnnnnnnnnnnnnnnnnnnnnnnnnnnnnnnnnnnnnnnnnnnnnnnnnnnnnnnnnnnnnnnnnnnnnnnnnnnnnnnnnnnnnnnnnnnnnnnnnnnnnnnnnnnnnnnnnnnnnnnnnnnnnnnnnnnnnnnnnnnnnnnnnnnnnnnnnnnnnnnnnnnnnnnnnnnnnnnnnnnnnnnnnnnnnnnnnnnnnnnnnnnnnnnnnnnnnnnnnnnnnnnnnnnnnnnnnnnnnnnnnnnnnnnnnnnnnnnnnnnnnnnnnnnnnnnnnnnnnnnnnnnnnnnnnnnnnnnnnnnnnnnnnnnnnnnnnnnnnnnnnnnnnnnnnnnnnnnnnnnnnnnnnnnnnnnnnnnnnnnnnnnnnnnnnnnnnnnnnnnnnnnnnnnnnnnnnnnnnnnnnnnnnnnnnnnnnnnnnnnnnnnnnnnnnnnnnnnnnnnnnnnnnnnnnnnnnnnnnnnnnnnnnnnnnnnnnnnnnnnnnnnnnnnnnnnnnnnnnnnnnnnnnnnnnnnnnnnnnnnnnnnnnnnnnnnnnnnnnnnnnnnnnnnnnnnnnnnnnnnnnnnnnnnnnnnnnnnnnnnnnnnnnnnnnnnnnnnnnnnnnnnnnnnnnnnnnnnnnnnnnnnnnnnnnnnnnnnnnnnnnnnnnnnnnnnnnnnnnnnnnnnnnnnnnnnnnnnnnnnnnnnnnnnnnnnnnnnnnnnnnnnnnnnnnnnnnnnnnnnnnnnnnnnnnnnnnnnnnnnnnnnnnnnnnnnnnnnnnnnnnnnnnnnnnnnnnnnnnnnnnnnnnnnnnnnnnnnnnnnnnnnnnnnnnnnnnnnnnnnnnnnnnnnnnnnnnnnnnnnnnnnnnnnnnnnnnnnnnnnnnnnnnnnnnnnnnnnnnnnnnnnnnnnnnnnnnnnnnnnnnnnnnnnnnnnnnnnnnnnnnnnnnnnnnnnnnnnnnnnnnnnnnnnnnnnnnnnnnnnnnnnnnnnnnnnnnnnnnnnnnnnnnnnnnnnnnnnnnnnnnnnnnnnnnnnnnnnnnnnnnnnnnnnnnnnnnnnnnnnnnnnnnnnnnnnnnnnnnnnnnnnnnnnnnnnnnnnnnnnnnnnnnnnnnnnnnnnnnnnnnnnnnnnnnnnnnnnnnnnnnnnnnnnnnnnnnnnnnnnnnnnnnnnnnnnnnnnnnnnnnnnnnnnnnnnnnnnnnnnnnnnnnnnnnnnnnnnnnnnnnnnnnnnnnnnnnnnnnnnnnnnnnnnnnnnnnnnnnnnnnnnnnnnnnnnnnnnnnnnnnnnnnnnnnnnnnnnnnnnnnnnnnnnnnnnnnnnnnnnnnnnnnnnnnnnnnnnnnnnnnnnnnnnnnnnnnnnnnnnnnnnnnnnnnnnnnnnnnnnnnnnnnnnnnnnnnnnnnnnnnnnnnnnnnnnnnnnnnnnnnnnnnnnnnnnnnnnnnnnnnnnnnnnnnnnnnnnnnnnnnnnnnnnnnnnnnnnnnnnnnnnnnnnnnnnnnnnnnnnnnnnnnnnnnnnnnnnnnnnnnnnnnnnnnnnnnnnnnnnnnnnnnnnnnnnnnnnnnnnnnnnnnnnnnnnnnnnnnnnnnnnnnnnnnnnnnnnnnnnnnnnnnnnnnnnnnnnnnnnnnnnnnnnnnnnnnnnnnnnnnnnnnnnnnnnnnnnnnnnnnnnnnnnnnnnnnnnnnnnnnnnnnnnnnnnnnnnnnnnnnnnnnnnnnnnnnnnnnnnnnnnnnnnnnnnnnnnnnnnnnnnnnnnnnnnnnnnnnnnnnnnnnnnnnnnnnnnnnnnnnnnnnnnnnnnnnnnnnnnnnnnnnnnnnnnnnnnnnnnnnnnnnnnnnnnnnnnnnnnnnnnnnnnnnnnnnnnnnnnnnnnnnnnnnnnnnnnnnnnnnnnnnnnnnnnnnnnnnnnnnnnnnnnnnnnnnnnnnnnnnnnnnnnnnnnnnnnnnnnnnnnnnnnnnnnnnnnnnnnnnnnnnnnnnnnnnnnnnnnnnnnnnnnnnnnnnnnnnnnnnnnnnnnnnnnnnnnnnnnnnnnnnnnnnnnnnnnnnnnnnnnnnnnnnnnnnnnnnnnnnnnnnnnnnnnnnnnnnnnnnnnnnnnnnnnnnnnnnnnnnnnnnnnnnnnnnnnnnnnnnnnnnnnnnnnnnnnnnnnnnnnnnnnnnnnnnnnnnnnnnnnnnnnnnnnnnnnnnnnnnnnnnnnnnnnnnnnnnnnnnnnnnnnnnnnnnnnnnnnnnnnnnnnnnnnnnnnnnnnnnnnnnnnnnnnnnnnnnnnnnnnnnnnnnnnnnnnnnnnnnnnnnnnnnnnnnnnnnnnnnnnnnnnnnnnnnnnnnnnnnnnnnnnnnnnnnnnnnnnnnnnnnnnnnnnnnnnnnnnnnnnnnnnnnnnnnnnnnnnnnnnnnnnnnnnnnnnnnnnnnnnnnnnnnnnnnnnnnnnnnnnnnnnnnnnnnnnnnnnnnnnnnnnnnnnnnnnnnnnnnnnnnnnnnnnnnnnnnnnnnnnnnnnnnnnnnnnnnnnnnnnnnnnnnnnnnnnnnnnnnnnnnnnnnnnnnnnnnnnnnnnnnnnnnnnnnnnnnnnnnnnnnnnnnnnnnnnnnnnnnnnnnnnnnnnnnnnnnnnnnnnnnnnnnnnnnnnnnnnnnnnnnnnnnnnnnnnnnnnnnnnnnnnnnnnnnnnnnnnnnnnnnnnnnnnnnnnnnnnnnnnnnnnnnnnnnnnnnnnnnnnnnnnnnnnnnnnnnnnnnnnnnnnnnnnnnnnnnnnnnnnnnnnnnnnnnnnnnnnnnnnnnnnnnnnnnnnnnnnnnnnnnnnnnnnnnnnnnnnnnnnnnnnnnnnnnnnnnnnnnnnnnnnnnnnnnnnnnnnnnnnnnnnnnnnnnnnnnnnnnnnnnnnnnnnnnnnnnnnnnnnnnnnnnnnnnnnnnnnnnnnnnnnnnnnnnnnnnnnnnnnnnnnnnnnnnnnnnnnnnnnnnnnnnnnnnnnnnnnnnnnnnnnnnnnnnnnnnnnnnnnnnnnnnnnnnnnnnnnnnnnnnnnnnnnnnnnnnnnnnnnnnnnnnnnnnnnnnnnnnnnnnnnnnnnnnnnnnnnnnnnnnnnnnnnnnnnnnnnnnnnnnnnnnnnnnnnnnnnnnnnnnnnnnnnnnnnnnnnnnnnnnnnnnnnnnnnnnnnnnnnnnnnnnnnnnnnnnnnnnnnnnnnnnnnnnnnnnnnnnnnnnnnnnnnnnnnnnnnnnnnnnnnnnnnnnnnnnnnnnnnnnnnnnnnnnnnnnnnnnnnnnnnnnnnnnnnnnnnnnnnnnnnnnnnnnnnnnnnnnnnnnnnnnnnnnnnnnnnnnnnnnnnnnnnnnnnnnnnnnnnnnnnnnnnnnnnnnnnnnnnnnnnnnnnnnnnnnnnnnnnnnnnnnnnnnnnnnnnnnnnnnnnnnnnnnnnnnnnnnnnnnnnnnnnnnnnnnnnnnnnnnnnnnnnnnnnnnnnnnnnnnnnnnnnnnnnnnnnnnnnnnnnnnnnnnnnnnnnnnnnnnnnnnnnnnnnnnnnnnnnnnnnnnnnnnnnnnnnnnnnnnnnnnnnnnnnnnnnnnnnnnnnnnnnnnnnnnnnnnnnnnnnnnnnnnnnnnnnnnnnnnnnnnnnnnnnnnnnnnnnnnnnnnnnnnnnnnnnnnnnnnnnnnnnnnnnnnnnnnnnnnnnnnnnnnnnnnnnnnnnnnnnnnnnnnnnnnnnnnnnnnnnnnnnnnnnnnnnnnnnnnnnnnnnnnnnnnnnnnnnnnnnnnnnnnnnnnnnnnnnnnnnnnnnnnnnnnnnnnnnnnnnnnnnnnnnnnnnnnnnnnnnnnnnnnnnnnnnnnnnnnnnnnnnnnnnnnnnnnnnnnnnnnnnnnnnnnnnnnnnnnnnnnnnnnnnnnnnnnnnnnnnnnnnnnnnnnnnnnnnnnnnnnnnnnnnnnnnnnnnnnnnnnnnnnnnnnnnnnnnnnnnnnnnnnnnnnnnnnnnnnnnnnnnnnnnnnnnnnnnnnnnnnnnnnnnnnnnnnnnnnnnnnnnnnnnnnnnnnnnnnnnnnnnnnnnnnnnnnnnnnnnnnnnnnnnnnnnnnnnnnnnnnnnnnnnnnnnnnnnnnnnnnnnnnnnnnnnnnnnnnnnnnnnnnnnnnnnnnnnnnnnnnnnnnnnnnnnnnnnnnnnnnnnnnnnnnnnnnnnnnnnnnnnnnnnnnnnnnnnnnnnnnnnnnnnnnnnnnnnnnnnnnnnnnnnnnnnnnnnnnnnnnnnnnnnnnnnnnnnnnnnnnnnnnnnnnnnnnnnnnnnnnnnnnnnnnnnnnnnnnnnnnnnnnnnnnnnnnnnnnnnnnnnnnnnnnnnnnnnnnnnnnnnnnnnnnnnnnnnnnnnnnnnnnnnnnnnnnnnnnnnnnnnnnnnnnnnnnnnnnnnnnnnnnnnnnnnnnnnnnnnnnnnnnnnnnnnnnnnnnnnnnnnnnnnnnnnnnnnnnnnnnnnnnnnnnnnnnnnnnnnnnnnnnnnnnnnnnnnnnnnnnnnnnnnnnnnnnnnnnnnnnnnnnnnnnnnnnnnnnnnnnnnnnnnnnnnnnnnnnnnnnnnnnnnnnnnnnnnnnnnnnnnnnnnnnnnnnnnnnnnnnnnnnnnnnnnnnnnnnnnnnnnnnnnnnnnnnnnnnnnnnnnnnnnnnnnnnnnnnnnnnnnnnnnnnnnnnnnnnnnnnnnnnnnnnnnnnnnnnnnnnnnnnnnnnnnnnnnnnnnnnnnnnnnnnnnnnnnnnnnnnnnnnnnnnnnnnnnnnnnnnnnnnnnnnnnnnnnnnnnnnnnnnnnnnnnnnnnnnnnnnnnnnnnnnnnnnnnnnnnnnnnnnnnnnnnnnnnnnnnnnnnnnnnnnnnnnnnnnnnnnnnnnnnnnnnnnnnnnnnnnnnnnnnnnnnnnnnnnnnnnnnnnnnnnnnnnnnnnnnnnnnnnnnnnnnnnnnnnnnnnnnnnnnnnnnnnnnnnnnnnnnnnnnnnnnnnnnnnnnnnnnnnnnnnnnnnnnnnnnnnnnnnnnnnnnnnnnnnnnnnnnnnnnnnnnnnnnnnnnnnnnnnnnnnnnnnnnnnnnnnnnnnnnnnnnnnnnnnnnnnnnnnnnnnnnnnnnnnnnnnnnnnnnnnnnnnnnnnnnnnnnnnnnnnnnnnnnnnnnnnnnnnnnnnnnnnnnnnnnnnnnnnnnnnnnnnnnnnnnnnnnnnnnnnnnnnnnnnnnnnnnnnnnnnnnnnnnnnnnnnnnnnnnnnnnnnnnnnnnnnnnnnnnnnnnnnnnnnnnnnnnnnnnnnnnnnnnnnnnnnnnnnnnnnnnnnnnnnnnnnnnnnnnnnnnnnnnnnnnnnnnnnnnnnnnnnnnnnnnnnnnnnnnnnnnnnnnnnnnnnnnnnnnnnnnnnnnnnnnnnnnnnnnnnnnnnnnnnnnnnnnnnnnnnnnnnnnnnnnnnnnnnnnnnnnnnnnnnnnnnnnnnnnnnnnnnnnnnnnnnnnnnnnnnnnnnnnnnnnnnnnnnnnnnnnnnnnnnnnnnnnnnnnnnnnnnnnnnnnnnnnnnnnnnnnnnnnnnnnnnnnnnnnnnnnnnnnnnnnnnnnnnnnnnnnnnnnnnnnnnnnnnnnnnnnnnnnnnnnnnnnnnnnnnnnnnnnnnnnnnnnnnnnnnnnnnnnnnnnnnnnnnnnnnnnnnnnnnnnnnnnnnnnnnnnnnnnnnnnnnnnnnnnnnnnnnnnnnnnnnnnnnnnnnnnnnnnnnnnnnnnnnnnnnnnnnnnnnnnnnnnnnnnnnnnnnnnnnnnnnnnnnnnnnnnnnnnnnnnnnnnnnnnnnnnnnnnnnnnnnnnnnnnnnnnnnnnnnnnnnnnnnnnnnnnnnnnnnnnnnnnnnnnnnnnnnnnnnnnnnnnnnnnnnnnnnnnnnnnnnnnnnnnnnnnnnnnnnnnnnnnnnnnnnnnnnnnnnnnnnnnnnnnnnnnnnnnnnnnnnnnnnnnnnnnnnnnnnnnnnnnnnnnnnnnnnnnnnnnnnnnnnnnnnnnnnnnnnnnnnnnnnnnnnnnnnnnnnnnnnnnnnnnnnnnnnnnnnnnnnnnnnnnnnnnnnnnnnnnnnnnnnnnnnnnnnnnnnnnnnnnnnnnnnnnnnnnnnnnnnnnnnnnnnnnnnnnnnnnnnnnnnnnnnnnnnnnnnnnnnnnnnnnnnnnnnnnnnnnnnnnnnnnnnnnnnnnnnnnnnnnnnnnnnnnnnnnnnnnnnnnnnnnnnnnnnnnnnnnnnnnnnnnnnnnnnnnnnnnnnnnnnnnnnnnnnnnnnnnnnnnnnnnnnnnnnnnnnnnnnnnnnnnnnnnnnnnnnnnnnnnnnnnnnnnnnnnnnnnnnnnnnnnnnnnnnnnnnnnnnnnnnnnnnnnnnnnnnnnnnnnnnnnnnnnnnnnnnnnnnnnnnnnnnnnnnnnnnnnnnnnnnnnnnnnnnnnnnnnnnnnnnnnnnnnnnnnnnnnnnnnnnnnnnnnnnnnnnnnnnnnnnnnnnnnnnnnnnnnnnnnnnnnnnnnnnnnnnnnnnnnnnnnnnnnnnnnnnnnnnnnnnnnnnnnnnnnnnnnnnnnnnnnnnnnnnnnnnnnnnnnnnnnnnnnnnnnnnnnnnnnnnnnnnnnnnnnnnnnnnnnnnnnnnnnnnnnnnnnnnnnnnnnnnnnnnnnnnnnnnnnnnnnnnnnnnnnnnnnnnnnnnnnnnnnnnnnnnnnnnnnnnnnnnnnnnnnnnnnnnnnnnnnnnnnnnnnnnnnnnnnnnnnnnnnnnnnnnnnnnnnnnnnnnnnnnnnnnnnnnnnnnnnnnnnnnnnnnnnnnnnnnnnnnnnnnnnnnnnnnnnnnnnnnnnnnnnnnnnnnnnnnnnnnnnnnnnnnnnnnnnnnnnnnnnnnnnnnnnnnnnnnnnnnnnnnnnnnnnnnnnnnnnnnnnnnnnnnnnnnnnnnnnnnnnnnnnnnnnnnnnnnnnnnnnnnnnnnnnnnnnnnnnnnnnnnnnnnnnnnnnnnnnnnnnnnnnnnnnnnnnnnnnnnnnnnnnnnnnnnnnnnnnnnnnnnnnnnnnnnnnnnnnnnnnnnnnnnnnnnnnnnnnnnnnnnnnnnnnnnnnnnnnnnnnnnnnnnnnnnnnnnnnnnnnnnnnnnnnnnnnnnnnnnnnnnnnnnnnnnnnnnnnnnnnnnnnnnnnnnnnnnnnnnnnnnnnnnnnnnnnnnnnnnnnnnnnnnnnnnnnnnnnnnnnnnnnnnnnnnnnnnnnnnnnnnnnnnnnnnnnnnnnnnnnnnnnnnnnnnnnnnnnnnnnnnnnnnnnnnnnnnnnnnnnnnnnnnnnnnnnnnnnnnnnnnnnnnnnnnnnnnnnnnnnnnnnnnnnnnnnnnnnnnnnnnnnnnnnnnnnnnnnnnnnnnnnnnnnnnnnnnnnnnnnnnnnnnnnnnnnnnnnnnnnnnnnnnnnnnnnnnnnnnnnnnnnnnnnnnnnnnnnnnnnnnnnnnnnnnnnnnnnnnnnnnnnnnnnnnnnnnnnnnnnnnnnnnnnnnnnnnnnnnnnnnnnnnnnnnnnnnnnnnnnnnnnnnnnnnnnnnnnnnnnnnnnnnnnnnnnnnnnnnnnnnnnnnnnnnnnnnnnnnnnnnnnnnnnnnnnnnnnnnnnnnnnnnnnnnnnnnnnnnnnnnnnnnnnnnnnnnnnnnnnnnnnnnnnnnnnnnnnnnnnnnnnnnnnnnnnnnnnnnnnnnnnnnnnnnnnnnnnnnnnnnnnnnnnnnnnnnnnnnnnnnnnnnnnnnnnnnnnnnnnnnnnnnnnnnnnnnnnnnnnnnnnnnnnnnnnnnnnnnnnnnnnnnnnnnnnnnnnnnnnnnnnnnnnnnnnnnnnnnnnnnnnnnnnnnnnnnnnnnnnnnnnnnnnnnnnnnnnnnnnnnnnnnnnnnnnnnnnnnnnnnnnnnnnnnnnnnnnnnnnnnnnnnnnnnnnnnnnnnnnnnnnnnnnnnnnnnnnnnnnnnnnnnnnnnnnnnnnnnnnnnnnnnnnnnnnnnnnnnnnnnnnnnnnnnnnnnnnnnnnnnnnnnnnnnnnnnnnnnnnnnnnnnnnnnnnnnnnnnnnnnnnnnnnnnnnnnnnnnnnnnnnnnnnnnnnnnnnnnnnnnnnnnnnnnnnnnnnnnnnnnnnnnnnnnnnnnnnnnnnnnnnnnnnnnnnnnnnnnnnnnnnnnnnnnnnnnnnnnnnnnnnnnnnnnnnnnnnnnnnnnnnnnnnnnnnnnnnnnnnnnnnnnnnnnnnnnnnnnnnnnnnnnnnnnnnnnnnnnnnnnnnnnnnnnnnnnnnnnnnnnnnnnnnnnnnnnnnnnnnnnnnnnnnnnnnnnnnnnnnnnnnnnnnnnnnnnnnnnnnnnnnnnnnnnnnnnnnnnnnnnnnnnnnnnnnnnnnnnnnnnnnnnnnnnnnnnnnnnnnnnnnnnnnnnnnnnnnnnnnnnnnnnnnnnnnnnnnnnnnnnnnnnnnnnnnnnnnnnnnnnnnnnnnnnnnnnnnnnnnnnnnnnnnnnnnnnnnnnnnnnnnnnnnnnnnnnnnnnnnnnnnnnnnnnnnnnnnnnnnnnnnnnnnnnnnnnnnnnnnnnnnnnnnnnnnnnnnnnnnnnnnnnnnnnnnnnnnnnnnnnnnnnnnnnnnnnnnnnnnnnnnnnnnnnnnnnnnnnnnnnnnnnnnnnnnnnnnnnnnnnnnnnnnnnnnnnnnnnnnnnnnnnnnnnnnnnnnnnnnnnnnnnnnnnnnnnnnnnnnnnnnnnnnnnnnnnnnnnnnnnnnnnnnnnnnnnnnnnnnnnnnnnnnnnnnnnnnnnnnnnnnnnnnnnnnnnnnnnnnnnnnnnnnnnnnnnnnnnnnnnnnnnnnnnnnnnnnnnnnnnnnnnnnnnnnnnnnnnnnnnnnnnnnnnnnnnnnnnnnnnnnnnnnnnnnnnnnnnnnnnnnnnnnnnnnnnnnnnnnnnnnnnnnnnnnnnnnnnnnnnnnnnnnnnnnnnnnnnnnnnnnnnnnnnnnnnnnnnnnnnnnnnnnnnnnnnnnnnnnnnnnnnnnnnnnnnnnnnnnnnnnnnnnnnnnnnnnnnnnnnnnnnnnnnnnnnnnnnnnnnnnnnnnnnnnnnnnnnnnnnnnnnnnnnnnnnnnnnnnnnnnnnnnnnnnnnnnnnnnnnnnnnnnnnnnnnnnnnnnnnnnnnnnnnnnnnnnnnnnnnnnnnnnnnnnnnnnnnnnnnnnnnnnnnnnnnnnnnnnnnnnnnnnnnnnnnnnnnnnnnnnnnnnnnnnnnnnnnnnnnnnnnnnnnnnnnnnnnnnnnnnnnnnnnnnnnnnnnnnnnnnnnnnnnnnnnnnnnnnnnnnnnnnnnnnnnnnnnnnnnnnnnnnnnnnnnnnnnnnnnnnnnnnnnnnnnnnnnnnnnnnnnnnnnnnnnnnnnnnnnnnnnnnnnnnnnnnnnnnnnnnnnnnnnnnnnnnnnnnnnnnnnnnnnnnnnnnnnnnnnnnnnnnnnnnnnnnnnnnnnnnnnnnnnnnnnnnnnnnnnnnnnnnnnnnnnnnnnnnnnnnnnnnnnnnnnnnnnnnnnnnnnnnnnnnnnnnnnnnnnnnnnnnnnnnnnnnnnnnnnnnnnnnnnnnnnnnnnnnnnnnnnnnnnnnnnnnnnnnnnnnnnnnnnnnnnnnnnnnnnnnnnnnnnnnnnnnnnnnnnnnnnnnnnnnnnnnnnnnnnnnnnnnnnnnnnnnnnnnnnnnnnnnnnnnnnnnnnnnnnnnnnnnnnnnnnnnnnnnnnnnnnnnnnnnnnnnnnnnnnnnnnnnnnnnnnnnnnnnnnnnnnnnnnnnnnnnnnnnnnnnnnnnnnnnnnnnnnnnnnnnnnnnnnnnnnnnnnnnnnnnnnnnnnnnnnnnnnnnnnnnnnnnnnnnnnnnnnnnnnnnnnnnnnnnnnnnnnnnnnnnnnnnnnnnnnnnnnnnnnnnnnnnnnnnnnnnnnnnnnnnnnnnnnnnnnnnnnnnnnnnnnnnnnnnnnnnnnnnnnnnnnnnnnnnnnnnnnnnnnnnnnnnnnnnnnnnnnnnnnnnnnnnnnnnnnnnnnnnnnnnnnnnnnnnnnnnnnnnnnnnnnnnnnnnnnnnnnnnnnnnnnnnnnnnnnnnnnnnnnnnnnnnnnnnnnnnnnnnnnnnnnnnnnnnnnnnnnnnnnnnnnnnnnnnnnnnnnnnnnnnnnnnnnnnnnnnnnnnnnnnnnnnnnnnnnnnnnnnnnnnnnnnnnnnnnnnnnnnnnnnnnnnnnnnnnnnnnnnnnnnnnnnnnnnnnnnnnnnnnnnnnnnnnnnnnnnnnnnnnnnnnnnnnnnnnnnnnnnnnnnnnnnnnnnnnnnnnnnnnnnnnnnnnnnnnnnnnnnnnnnnnnnnnnnnnnnnnnnnnnnnnnnnnnnnnnnnnnnnnnnnnnnnnnnnnnnnnnnnnnnnnnnnnnnnnnnnnnnnnnnnnnnnnnnnnnnnnnnnnnnnnnnnnnnnnnnnnnnnnnnnnnnnnnnnnnnnnnnnnnnnnnnnnnnnnnnnnnnnnnnnnnnnnnnnnnnnnnnnnnnnnnnnnnnnnnnnnnnnnnnnnnnnnnnnnnnnnnnnnnnnnnnnnnnnnnnnnnnnnnnnnnnnnnnnnnnnnnnnnnnnnnnnnnnnnnnnnnnnnnnnnnnnnnnnnnnnnnnnnnnnnnnnnnnnnnnnnnnnnnnnnnnnnnnnnnnnnnnnnnnnnnnnnnnnnnnnnnnnnnnnnnnnnnnnnnnnnnnnnnnnnnnnnnnnnnnnnnnnnnnnnnnnnnnnnnnnnnnnnnnnnnnnnnnnnnnnnnnnnnnnnnnnnnnnnnnnnnnnnnnnnnnnnnnnnnnnnnnnnnnnnnnnnnnnnnnnnnnnnnnnnnnnnnnnnnnnnnnnnnnnnnnnnnnnnnnnnnnnnnnnnnnnnnnnnnnnnnnnnnnnnnnnnnnnnnnnnnnnnnnnnnnnnnnnnnnnnnnnnnnnnnnnnnnnnnnnnnnnnnnnnnnnnnnnnnnnnnnnnnnnnnnnnnnnnnnnnnnnnnnnnnnnnnnnnnnnnnnnnnnnnnnnnnnnnnnnnnnnnnnnnnnnnnnnnnnnnnnnnnnnnnnnnnnnnnnnnnnnnnnnnnnnnnnnnnnnnnnnnnnnnnnnnnnnnnnnnnnnnnnnnnnnnnnnnnnnnnnnnnnnnnnnnnnnnnnnnnnnnnnnnnnnnnnnnnnnnnnnnnnnnnnnnnnnnnnnnnnnnnnnnnnnnnnnnnnnnnnnnnnnnnnnnnnnnnnnnnnnnnnnnnnnnnnnnnnnnnnnnnnnnnnnnnnnnnnnnnnnnnnnnnnnnnnnnnnnnnnnnnnnnnnnnnnnnnnnnnnnnnnnnnnnnnnnnnnnnnnnnnnnnnnnnnnnnnnnnnnnnnnnnnnnnnnnnnnnnnnnnnnnnnnnnnnnnnnnnnnnnnnnnnnnnnnnnnnnnnnnnnnnnnnnnnnnnnnnnnnnnnnnnnnnnnnnnnnnnnnnnnnnnnnnnnnnnnnnnnnnnnnnnnnnnnnnnnnnnnnnnnnnnnnnnnnnnnnnnnnnnnnnnnnnnnnnnnnnnnnnnnnnnnnnnnnnnnnnnnnnnnnnnnnnnnnnnnnnnnnnnnnnnnnnnnnnnnnnnnnnnnnnnnnnnnnnnnnnnnnnnnnnnnnnnnnnnnnnnnnnnnnnnnnnnnnnnnnnnnnnnnnnnnnnnnnnnnnnnnnnnnnnnnnnnnnnnnnnnnnnnnnnnnnnnnnnnnnnnnnnnnnnnnnnnnnnnnnnnnnnnnnnnnnnnnnnnnnnnnnnnnnnnnnnnnnnnnnnnnnnnnnnnnnnnnnnnnnnnnnnnnnnnnnnnnnnnnnnnnnnnnnnnnnnnnnnnnnnnnnnnnnnnnnnnnnnnnnnnnnnnnnnnnnnnnnnnnnnnnnnnnnnnnnnnnnnnnnnnnnnnnnnnnnnnnnnnnnnnnnnnnnnnnnnnnnnnnnnnnnnnnnnnnnnnnnnnnnnnnnnnnnnnnnnnnnnnnnnnnnnnnnnnnnnnnnnnnnnnnnnnnnnnnnnnnnnnnnnnnnnnnnnnnnnnnnnnnnnnnnnnnnnnnnnnnnnnnnnnnnnnnnnnnnnnnnnnnnnnnnnnnnnnnnnnnnnnnnnnnnnnnnnnnnnnnnnnnnnnnnnnnnnnnnnnnnnnnnnnnnnnnnnnnnnnnnnnnnnnnnnnnnnnnnnnnnnnnnnnnnnnnnnnnnnnnnnnnnnnnnnnnnnnnnnnnnnnnnnnnnnnnnnnnnnnnnnnnnnnnnnnnnnnnnnnnnnnnnnnnnnnnnnnnnnnnnnnnnnnnnnnnnnnnnnnnnnnnnnnnnnnnnnnnnnnnnnnnnnnnnnnnnnnnnnnnnnnnnnnnnnnnnnnnnnnnnnnnnnnnnnnnnnnnnnnnnnnnnnnnnnnnnnnnnnnnnnnnnnnnnnnnnnnnnnnnnnnnnnnnnnnnnnnnnnnnnnnnnnnnnnnnnnnnnnnnnnnnnnnnnnnnnnnnnnnnnnnnnnnnnnnnnnnnnnnnnnnnnnnnnnnnnnnnnnnnnnnnnnnnnnnnnnnnnnnnnnnnnnnnnnnnnnnnnnnnnnnnnnnnnnnnnnnnnnnnnnnnnnnnnnnnnnnnnnnnnnnnnnnnnnnnnnnnnnnnnnnnnnnnnnnnnnnnnnnnnnnnnnnnnnnnnnnnnnnnnnnnnnnnnnnnnnnnnnnnnnnnnnnnnnnnnnnnnnnnnnnnnnnnnnnnnnnnnnnnnnnnnnnnnnnnnnnnnnnnnnnnnnnnnnnnnnnnnnnnnnnnnnnnnnnnnnnnnnnnnnnnnnnnnnnnnnnnnnnnnnnnnnnnnnnnnnnnnnnnnnnnnnnnnnnnnnnnnnnnnnnnnnnnnnnnnnnnnnnnnnnnnnnnnnnnnnnnnnnnnnnnnnnnnnnnnnnnnnnnnnnnnnnnnnnnnnnnnnnnnnnnnnnnnnnnnnnnnnnnnnnnnnnnnnnnnnnnnnnnnnnnnnnnnnnnnnnnnnnnnnnnnnnnnnnnnnnnnnnnnnnnnnnnnnnnnnnnnnnnnnnnnnnnnnnnnnnnnnnnnnnnnnnnnnnnnnnnnnnnnnnnnnnnnnnnnnnnnnnnnnnnnnnnnnnnnnnnnnnnnnnnnnnnnnnnnnnnnnnnnnnnnnnnnnnnnnnnnnnnnnnnnnnnnnnnnnnnnnnnnnnnnnnnnnnnnnnnnnnnnnnnnnnnnnnnnnnnnnnnnnnnnnnnnnnnnnnnnnnnnnnnnnnnnnnnnnnnnnnnnnnnnnnnnnnnnnnnnnnnnnnnnnnnnnnnnnnnnnnnnnnnnnnnnnnnnnnnnnnnnnnnnnnnnnnnnnnnnnnnnnnnnnnnnnnnnnnnnnnnnnnnnnnnnnnnnnnnnnnnnnnnnnnnnnnnnnnnnnnnnnnnnnnnnnnnnnnnnnnnnnnnnnnnnnnnnnnnnnnnnnnnnnnnnnnnnnnnnnnnnnnnnnnnnnnnnnnnnnnnnnnnnnnnnnnnnnnnnnnnnnnnnnnnnnnnnnnnnnnnnnnnnnnnnnnnnnnnnnnnnnnnnnnnnnnnnnnnnnnnnnnnnnnnnnnnnnnnnnnnnnnnnnnnnnnnnnnnnnnnnnnnnnnnnnnnnnnnnnnnnnnnnnnnnnnnnnnnnnnnnnnnnnnnnnnnnnnnnnnnnnnnnnnnnnnnnnnnnnnnnnnnnnnnnnnnnnnnnnnnnnnnnnnnnnnnnnnnnnnnnnnnnnnnnnnnnnnnnnnnnnnnnnnnnnnnnnnnnnnnnnnnnnnnnnnnnnnnnnnnnnnnnnnnnnnnnnnnnnnnnnnnnnnnnnnnnnnnnnnnnnnnnnnnnnnnnnnnnnnnnnnnnnnnnnnnnnnnnnnnnnnnnnnnnnnnnnnnnnnnnnnnnnnnnnnnnnnnnnnnnnnnnnnnnnnnnnnnnnnnnnnnnnnnnnnnnnnnnnnnnnnnnnnnnnnnnnnnnnnnnnnnnnnnnnnnnnnnnnnnnnnnnnnnnnnnnnnnnnnnnnnnnnnnnnnnnnnnnnnnnnnnnnnnnnnnnnnnnnnnnnnnnnnnnnnnnnnnnnnnnnnnnnnnnnnnnnnnnnnnnnnnnnnnnnnnnnnnnnnnnnnnnnnnnnnnnnnnnnnnnnnnnnnnnnnnnnnnnnnnnnnnnnnnnnnnnnnnnnnnnnnnnnnnnnnnnnnnnnnnnnnnnnnnnnnnnnnnnnnnnnnnnnnnnnnnnnnnnnnnnnnnnnnnnnnnnnnnnnnnnnnnnnnnnnnnnnnnnnnnnnnnnnnnnnnnnnnnnnnnnnnnnnnnnnnnnnnnnnnnnnnnnnnnnnnnnnnnnnnnnnnnnnnnnnnnnnnnnnnnnnnnnnnnnnnnnnnnnnnnnnnnnnnnnnnnnnnnnnnnnnnnnnnnnnnnnnnnnnnnnnnnnnnnnnnnnnnnnnnnnnnnnnnnnnnnnnnnnnnnnnnnnnnnnnnnnnnnnnnnnnnnnnnnnnnnnnnnnnnnnnnnnnnnnnnnnnnnnnnnnnnnnnnnnnnnnnnnnnnnnnnnnnnnnnnnnnnnnnnnnnnnnnnnnnnnnnnnnnnnnnnnnnnnnnnnnnnnnnnnnnnnnnnnnnnnnnnnnnnnnnnnnnnnnnnnnnnnnnnnnnnnnnnnnnnnnnnnnnnnnnnnnnnnnnnnnnnnnnnnnnnnnnnnnnnnnnnnnnnnnnnnnnnnnnnnnnnnnnnnnnnnnnnnnnnnnnnnnnnnnnnnnnnnnnnnnnnnnnnnnnnnnnnnnnnnnnnnnnnnnnnnnnnnnnnnnnnnnnnnnnnnnnnnnnnnnnnnnnnnnnnnnnnnnnnnnnnnnnnnnnnnnnnnnnnnnnnnnnnnnnnnnnnnnnnnnnnnnnnnnnnnnnnnnnnnnnnnnnnnnnnnnnnnnnnnnnnnnnnnnnnnnnnnnnnnnnnnnnnnnnnnnnnnnnnnnnnnnnnnnnnnnnnnnnnnnnnnnnnnnnnnnnnnnnnnnnnnnnnnnnnnnnnnnnnnnnnnnnnnnnnnnnnnnnnnnnnnnnnnnnnnnnnnnnnnnnnnnnnnnnnnnnnnnnnnnnnnnnnnnnnnnnnnnnnnnnnnnnnnnnnnnnnnnnnnnnnnnnnnnnnnnnnnnnnnnnnnnnnnnnnnnnnnnnnnnnnnnnnnnnnnnnnnnnnnnnnnnnnnnnnnnnnnnnnnnnnnnnnnnnnnnnnnnnnnnnnnnnnnnnnnnnnnnnnnnnnnnnnnnnnnnnnnnnnnnnnnnnnnnnnnnnnnnnnnnnnnnnnnnnnnnnnnnnnnnnnnnnnnnnnnnnnnnnnnnnnnnnnnnnnnnnnnnnnnnnnnnnnnnnnnnnnnnnnnnnnnnnnnnnnnnnnnnnnnnnnnnnnnnnnnnnnnnnnnnnnnnnnnnnnnnnnnnnnnnnnnnnnnnnnnnnnnnnnnnnnnnnnnnnnnnnnnnnnnnnnnnnnnnnnnnnnnnnnnnnnnnnnnnnnnnnnnnnnnnnnnnnnnnnnnnnnnnnnnnnnnnnnnnnnnnnnnnnnnnnnnnnnnnnnnnnnnnnnnnnnnnnnnnnnnnnnnnnnnnnnnnnnnnnnnnnnnnnnnnnnnnnnnnnnnnnnnnnnnnnnnnnnnnnnnnnnnnnnnnnnnnnnnnnnnnnnnnnnnnnnnnnnnnnnnnnnnnnnnnnnnnnnnnnnnnnnnnnnnnnnnnnnnnnnnnnnnnnnnnnnnnnnnnnnnnnnnnnnnnnnnnnnnnnnnnnnnnnnnnnnnnnnnnnnnnnnnnnnnnnnnnnnnnnnnnnnnnnnnnnnnnnnnnnnnnnnnnnnnnnnnnnnnnnnnnnnnnnnnnnnnnnnnnnnnnnnnnnnnnnnnnnnnnnnnnnnnnnnnnnnnnnnnnnnnnnnnnnnnnnnnnnnnnnnnnnnnnnnnnnnnnnnnnnnnnnnnnnnnnnnnnnnnnnnnnnnnnnnnnnnnnnnnnnnnnnnnnnnnnnnnnnnnnnnnnnnnnnnnnnnnnnnnnnnnnnnnnnnnnnnnnnnnnnnnnnnnnnnnnnnnnnnnnnnnnnnnnnnnnnnnnnnnnnnnnnnnnnnnnnnnnnnnnnnnnnnnnnnnnnnnnnnnnnnnnnnnnnnnnnnnnnnnnnnnnnnnnnnnnnnnnnnnnnnnnnnnnnnnnnnnnnnnnnnnnnnnnnnnnnnnnnnnnnnnnnnnnnnnnnnnnnnnnnnnnnnnnnnnnnnnnnnnnnnnnnnnnnnnnnnnnnnnnnnnnnnnnnnnnnnnnnnnnnnnnnnnnnnnnnnnnnnnnnnnnnnnnnnnnnnnnnnnnnnnnnnnnnnnnnnnnnnnnnnnnnnnnnnnnnnnnnnnnnnnnnnnnnnnnnnnnnnnnnnnnnnnnnnnnnnnnnnnnnnnnnnnnnnnnnnnnnnnnnnnnnnnnnnnnnnnnnnnnnnnnnnnnnnnnnnnnnnnnnnnnnnnnnnnnnnnnnnnnnnnnnnnnnnnnnnnnnnnnnnnnnnnnnnnnnnnnnnnnnnnnnnnnnnnnnnnnnnnnnnnnnnnnnnnnnnnnnnnnnnnnnnnnnnnnnnnnnnnnnnnnnnnnnnnnnnnnnnnnnnnnnnnnnnnnnnnnnnnnnnnnnnnnnnnnnnnnnnnnnnnnnnnnnnnnnnnnnnnnnnnnnnnnnnnnnnnnnnnnnnnnnnnnnnnnnnnnnnnnnnnnnnnnnnnnnnnnnnnnnnnnnnnnnnnnnnnnnnnnnnnnnnnnnnnnnnnnnnnnnnnnnnnnnnnnnnnnnnnnnnnnnnnnnnnnnnnnnnnnnnnnnnnnnnnnnnnnnnnnnnnnnnnnnnnnnnnnnnnnnnnnnnnnnnnnnnnnnnnnnnnnnnnnnnnnnnnnnnnnnnnnnnnnnnnnnnnnnnnnnnnnnnnnnnnnnnnnnnnnnnnnnnnnnnnnnnnnnnnnnnnnnnnnnnnnnnnnnnnnnnnnnnnnnnnnnnnnnnnnnnnnnnnnnnnnnnnnnnnnnnnnnnnnnnnnnnnnnnnnnnnnnnnnnnnnnnnnnnnnnnnnnnnnnnnnnnnnnnnnnnnnnnnnnnnnnnnnnnnnnnnnnnnnnnnnnnnnnnnnnnnnnnnnnnnnnnnnnnnnnnnnnnnnnnnnnnnnnnnnnnnnnnnnnnnnnnnnnnnnnnnnnnnnnnnnnnnnnnnnnnnnnnnnnnnnnnnnnnnnnnnnnnnnnnnnnnnnnnnnnnnnnnnnnnnnnnnnnnnnnnnnnnnnnnnnnnnnnnnnnnnnnnnnnnnnnnnnnnnnnnnnnnnnnnnnnnnnnnnnnnnnnnnnnnnnnnnnnnnnnnnnnnnnnnnnnnnnnnnnnnnnnnnnnnnnnnnnnnnnnnnnnnnnnnnnnnnnnnnnnnnnnnnnnnnnnnnnnnnnnnnnnnnnnnnnnnnnnnnnnnnnnnnnnnnnnnnnnnnnnnnnnnnnnnnnnnnnnnnnnnnnnnnnnnnnnnnnnnnnnnnnnnnnnnnnnnnnnnnnnnnnnnnnnnnnnnnnnnnnnnnnnnnnnnnnnnnnnnnnnnnnnnnnnnnnnnnnnnnnnnnnnnnnnnnnnnnnnnnnnnnnnnnnnnnnnnnnnnnnnnnnnnnnnnnnnnnnnnnnnnnnnnnnnnnnnnnnnnnnnnnnnnnnnnnnnnnnnnnnnnnnnnnnnnnnnnnnnnnnnnnnnnnnnnnnnnnnnnnnnnnnnnnnnnnnnnnnnnnnnnnnnnnnnnnnnnnnnnnnnnnnnnnnnnnnnnnnnnnnnnnnnnnnnnnnnnnnnnnnnnnnnnnnnnnnnnnnnnnnnnnnnnnnnnnnnnnnnnnnnnnnnnnnnnnnnnnnnnnnnnnnnnnnnnnnnnnnnnnnnnnnnnnnnnnnnnnnnnnnnnnnnnnnnnnnnnnnnnnnnnnnnnnnnnnnnnnnnnnnnnnnnnnnnnnnnnnnnnnnnnnnnnnnnnnnnnnnnnnnnnnnnnnnnnnnnnnnnnnnnnnnnnnnnnnnnnnnnnnnnnnnnnnnnnnnnnnnnnnnnnnnnnnnnnnnnnnnnnnnnnnnnnnnnnnnnnnnnnnnnnnnnnnnnnnnnnnnnnnnnnnnnnnnnnnnnnnnnnnnnnnnnnnnnnnnnnnnnnnnnnnnnnnnnnnnnnnnnnnnnnnnnnnnnnnnnnnnnnnnnnnnnnnnnnnnnnnnnnnnnnnnnnnnnnnnnnnnnnnnnnnnnnnnnnnnnnnnnnnnnnnnnnnnnnnnnnnnnnnnnnnnnnnnnnnnnnnnnnnnnnnnnnnnnnnnnnnnnnnnnnnnnnnnnnnnnnnnnnnnnnnnnnnnnnnnnnnnnnnnnnnnnnnnnnnnnnnnnnnnnnnnnnnnnnnnnnnnnnnnnnnnnnnnnnnnnnnnnnnnnnnnnnnnnnnnnnnnnnnnnnnnnnnnnnnnnnnnnnnnnnnnnnnnnnnnnnnnnnnnnnnnnnnnnnnnnnnnnnnnnnnnnnnnnnnnnnnnnnnnnnnnnnnnnnnnnnnnnnnnnnnnnnnnnnnnnnnnnnnnnnnnnnnnnnnnnnnnnnnnnnnnnnnnnnnnnnnnnnnnnnnnnnnnnnnnnnnnnnnnnnnnnnnnnnnnnnnnnnnnnnnnnnnnnnnnnnnnnnnnnnnnnnnnnnnnnnnnnnnnnnnnnnnnnnnnnnnnnnnnnnnnnnnnnnnnnnnnnnnnnnnnnnnnnnnnnnnnnnnnnnnnnnnnnnnnnnnnnnnnnnnnnnnnnnnnnnnnnnnnnnnnnnnnnnnnnnnnnnnnnnnnnnnnnnnnnnnnnnnnnnnnnnnnnnnnnnnnnnnnnnnnnnnnnnnnnnnnnnnnnnnnnnnnnnnnnnnnnnnnnnnnnnnnnnnnnnnnnnnnnnnnnnnnnnnnnnnnnnnnnnnnnnnnnnnnnnnnnnnnnnnnnnnnnnnnnnnnnnnnnnnnnnnnnnnnnnnnnnnnnnnnnnnnnnnnnnnnnnnnnnnnnnnnnnnnnnnnnnnnnnnnnnnnnnnnnnnnnnnnnnnnnnnnnnnnnnnnnnnnnnnnnnnnnnnnnnnnnnnnnnnnnnnnnnnnnnnnnnnnnnnnnnnnnnnnnnnnnnnnnnnnnnnnnnnnnnnnnnnnnnnnnnnnnnnnnnnnnnnnnnnnnnnnnnnnnnnnnnnnnnnnnnnnnnnnnnnnnnnnnnnnnnnnnnnnnnnnnnnnnnnnnnnnnnnnnnnnnnnnnnnnnnnnnnnnnnnnnnnnnnnnnnnnnnnnnnnnnnnnnnnnnnnnnnnnnnnnnnnnnnnnnnnnnnnnnnnnnnnnnnnnnnnnnnnnnnnnnnnnnnnnnnnnnnnnnnnnnnnnnnnnnnnnnnnnnnnnnnnnnnnnnnnnnnnnnnnnnnnnnnnnnnnnnnnnnnnnnnnnnnnnnnnnnnnnnnnnnnnnnnnnnnnnnnnnnnnnnnnnnnnnnnnnnnnnnnnnnnnnnnnnnnnnnnnnnnnnnnnnnnnnnnnnnnnnnnnnnnnnnnnnnnnnnnnnnnnnnnnnnnnnnnnnnnnnnnnnnnnnnnnnnnnnnnnnnnnnnnnnnnnnnnnnnnnnnnnnnnnnnnnnnnnnnnnnnnnnnnnnnnnnnnnnnnnnnnnnnnnnnnnnnnnnnnnnnnnnnnnnnnnnnnnnnnnnnnnnnnnnnnnnnnnnnnnnnnnnnnnnnnnnnnnnnnnnnnnnnnnnnnnnnnnnnnnnnnnnnnnnnnnnnnnnnnnnnnnnnnnnnnnnnnnnnnnnnnnnnnnnnnnnnnnnnnnnnnnnnnnnnnnnnnnnnnnnnnnnnnnnnnnnnnnnnnnnnnnnnnnnnnnnnnnnnnnnnnnnnnnnnnnnnnnnnnnnnnnnnnnnnnnnnnnnnnnnnnnnnnnnnnnnnnnnnnnnnnnnnnnnnnnnnnnnnnnnnnnnnnnnnnnnnnnnnnnnnnnnnnnnnnnnnnnnnnnnnnnnnnnnnnnnnnnnnnnnnnnnnnnnnnnnnnnnnnnnnnnnnnnnnnnnnnnnnnnnnnnnnnnnnnnnnnnnnnnnnnnnnnnnnnnnnnnnnnnnnnnnnnnnnnnnnnnnnnnnnnnnnnnnnnnnnnnnnnnnnnnnnnnnnnnnnnnnnnnnnnnnnnnnnnnnnnnnnnnnnnnnnnnnnnnnnnnnnnnnnnnnnnnnnnnnnnnnnnnnnnnnnnnnnnnnnnnnnnnnnnnnnnnnnnnnnnnnnnnnnnnnnnnnnnnnnnnnnnnnnnnnnnnnnnnnnnnnnnnnnnnnnnnnnnnnnnnnnnnnnnnnnnnnnnnnnnnnnnnnnnnnnnnnnnnnnnnnnnnnnnnnnnnnnnnnnnnnnnnnnnnnnnnnnnnnnnnnnnnnnnnnnnnnnnnnnnnnnnnnnnnnnnnnnnnnnnnnnnnnnnnnnnnnnnnnnnnnnnnnnnnnnnnnnnnnnnnnnnnnnnnnnnnnnnnnnnnnnnnnnnnnnnnnnnnnnnnnnnnnnnnnnnnnnnnnnnnnnnnnnnnnnnnnnnnnnnnnnnnnnnnnnnnnnnnnnnnnnnnnnnnnnnnnnnnnnnnnnnnnnnnnnnnnnnnnnnnnnnnnnnnnnnnnnnnnnnnnnnnnnnnnnnnnnnnnnnnnnnnnnnnnnnnnnnnnnnnnnnnnnnnnnnnnnnnnnnnnnnnnnnnnnnnnnnnnnnnnnnnnnnnnnnnnnnnnnnnnnnnnnnnnnnnnnnnnnnnnnnnnnnnnnnnnnnnnnnnnnnnnnnnnnnnnnnnnnnnnnnnnnnnnnnnnnnnnnnnnnnnnnnnnnnnnnnnnnnnnnnnnnnnnnnnnnnnnnnnnnnnnnnnnnnnnnnnnnnnnnnnnnnnnnnnnnnnnnnnnnnnnnnnnnnnnnnnnnnnnnnnnnnnnnnnnnnnnnnnnnnnnnnnnnnnnnnnnnnnnnnnnnnnnnnnnnnnnnnnnnnnnnnnnnnnnnnnnnnnnnnnnnnnnnnnnnnnnnnnnnnnnnnnnnnnnnnnnnnnnnnnnnnnnnnnnnnnnnnnnnnnnnnnnnnnnnnnnnnnnnnnnnnnnnnnnnnnnnnnnnnnnnnnnnnnnnnnnnnnnnnnnnnnnnnnnnnnnnnnnnnnnnnnnnnnnnnnnnnnnnnnnnnnnnnnnnnnnnnnnnnnnnnnnnnnnnnnnnnnnnnnnnnnnnnnnnnnnnnnnnnnnnnnnnnnnnnnnnnnnnnnnnnnnnnnnnnnnnnnnnnnnnnnnnnnnnnnnnnnnnnnnnnnnnnnnnnnnnnnnnnnnnnnnnnnnnnnnnnnnnnnnnnnnnnnnnnnnnnnnnnnnnnnnnnnnnnnnnnnnnnnnnnnnnnnnnnnnnnnnnnnnnnnnnnnnnnnnnnnnnnnnnnnnnnnnnnnnnnnnnnnnnnnnnnnnnnnnnnnnnnnnnnnnnnnnnnnnnnnnnnnnnnnnnnnnnnnnnnnnnnnnnnnnnnnnnnnnnnnnnnnnnnnnnnnnnnnnnnnnnnnnnnnnnnnnnnnnnnnnnnnnnnnnnnnnnnnnnnnnnnnnnnnnnnnnnnnnnnnnnnnnnnnnnnnnnnnnnnnnnnnnnnnnnnnnnnnnnnnnnnnnnnnnnnnnnnnnnnnnnnnnnnnnnnnnnnnnnnnnnnnnnnnnnnnnnnnnnnnnnnnnnnnnnnnnnnnnnnnnnnnnnnnnnnnnnnnnnnnnnnnnnnnnnnnnnnnnnnnnnnnnnnnnnnnnnnnnnnnnnnnnnnnnnnnnnnnnnnnnnnnnnnnnnnnnnnnnnnnnnnnnnnnnnnnnnnnnnnnnnnnnnnnnnnnnnnnnnnnnnnnnnnnnnnnnnnnnnnnnnnnnnnnnnnnnnnnnnnnnnnnnnnnnnnnnnnnnnnnnnnnnnnnnnnnnnnnnnnnnnnnnnnnnnnnnnnnnnnnnnnnnnnnnnnnnnnnnnnnnnnnnnnnnnnnnnnnnnnnnnnnnnnnnnnnnnnnnnnnnnnnnnnnnnnnnnnnnnnnnnnnnnnnnnnnnnnnnnnnnnnnnnnnnnnnnnnnnnnnnnnnnnnnnnnnnnnnnnnnnnnnnnnnnnnnnnnnnnnnnnnnnnnnnnnnnnnnnnnnnnnnnnnnnnnnnnnnnnnnnnnnnnnnnnnnnnnnnnnnnnnnnnnnnnnnnnnnnnnnnnnnnnnnnnnnnnnnnnnnnnnnnnnnnnnnnnnnnnnnnnnnnnnnnnnnnnnnnnnnnnnnnnnnnnnnnnnnnnnnnnnnnnnnnnnnnnnnnnnnnnnnnnnnnnnnnnnnnnnnnnnnnnnnnnnnnnnnnnnnnnnnnnnnnnnnnnnnnnnnnnnnnnnnnnnnnnnnnnnnnnnnnnnnnnnnnnnnnnnnnnnnnnnnnnnnnnnnnnnnnnnnnnnnnnnnnnnnnnnnnnnnnnnnnnnnnnnnnnnnnnnnnnnnnnnnnnnnnnnnnnnnnnnnnnnnnnnnnnnnnnnnnnnnnnnnnnnnnnnnnnnnnnnnnnnnnnnnnnnnnnnnnnnnnnnnnnnnnnnnnnnnnnnnnnnnnnnnnnnnnnnnnnnnnnnnnnnnnnnnnnnnnnnnnnnnnnnnnnnnnnnnnnnnnnnnnnnnnnnnnnnnnnnnnnnnnnnnnnnnnnnnnnnnnnnnnnnnnnnnnnnnnnnnnnnnnnnnnnnnnnnnnnnnnnnnnnnnnnnnnnnnnnnnnnnnnnnnnnnnnnnnnnnnnnnnnnnnnnnnnnnnnnnnnnnnnnnnnnnnnnnnnnnnnnnnnnnnnnnnnnnnnnnnnnnnnnnnnnnnnnnnnnnnnnnnnnnnnnnnnnnnnnnnnnnnnnnnnnnnnnnnnnnnnnnnnnnnnnnnnnnnnnnnnnnnnnnnnnnnnnnnnnnnnnnnnnnnnnnnnnnnnnnnnnnnnnnnnnnnnnnnnnnnnnnnnnnnnnnnnnnnnnnnnnnnnnnnnnnnnnnnnnnnnnnnnnnnnnnnnnnnnnnnnnnnnnnnnnnnnnnnnnnnnnnnnnnnnnnnnnnnnnnnnnnnnnnnnnnnnnnnnnnnnnnnnnnnnnnnnnnnnnnnnnnnnnnnnnnnnnnnnnnnnnnnnnnnnnnnnnnnnnnnnnnnnnnnnnnnnnnnnnnnnnnnnnnnnnnnnnnnnnnnnnnnnnnnnnnnnnnnnnnnnnnnnnnnnnnnnnnnnnnnnnnnnnnnnnnnnnnnnnnnnnnnnnnnnnnnnnnnnnnnnnnnnnnnnnnnnnnnnnnnnnnnnnnnnnnnnnnnnnnnnnnnnnnnnnnnnnnnnnnnnnnnnnnnnnnnnnnnnnnnnnnnnnnnnnnnnnnnnnnnnnnnnnnnnnnnnnnnnnnnnnnnnnnnnnnnnnnnnnnnnnnnnnnnnnnnnnnnnnnnnnnnnnnnnnnnnnnnnnnnnnnnnnnnnnnnnnnnnnnnnnnnnnnnnnnnnnnnnnnnnnnnnnnnnnnnnnnnnnnnnnnnnnnnnnnnnnnnnnnnnnnnnnnnnnnnnnnnnnnnnnnnnnnnnnnnnnnnnnnnnnnnnnnnnnnnnnnnnnnnnnnnnnnnnnnnnnnnnnnnnnnnnnnnnnnnnnnnnnnnnnnnnnnnnnnnnnnnnnnnnnnnnnnnnnnnnnnnnnnnnnnnnnnnnnnnnnnnnnnnnnnnnnnnnnnnnnnnnnnnnnnnnnnnnnnnnnnnnnnnnnnnnnnnnnnnnnnnnnnnnnnnnnnnnnnnnnnnnnnnnnnnnnnnnnnnnnnnnnnnnnnnnnnnnnnnnnnnnnnnnnnnnnnnnnnnnnnnnnnnnnnnnnnnnnnnnnnnnnnnnnnnnnnnnnnnnnnnnnnnnnnnnnnnnnnnnnnnnnnnnnnnnnnnnnnnnnnnnnnnnnnnnnnnnnnnnnnnnnnnnnnnnnnnnnnnnnnnnnnnnnnnnnnnnnnnnnnnnnnnnnnnnnnnnnnnnnnnnnnnnnnnnnnnnnnnnnnnnnnnnnnnnnnnnnnnnnnnnnnnnnnnnnnnnnnnnnnnnnnnnnnnnnnnnnnnnnnnnnnnnnnnnnnnnnnnnnnnnnnnnnnnnnnnnnnnnnnnnnnnnnnnnnnnnnnnnnnnnnnnnnnnnnnnnnnnnnnnnnnnnnnnnnnnnnnnnnnnnnnnnnnnnnnnnnnnnnnnnnnnnnnnnnnnnnnnnnnnnnnnnnnnnnnnnnnnnnnnnnnnnnnnnnnnnnnnnnnnnnnnnnnnnnnnnnnnnnnnnnnnnnnnnnnnnnnnnnnnnnnnnnnnnnnnnnnnnnnnnnnnnnnnnnnnnnnnnnnnnnnnnnnnnnnnnnnnnnnnnnnnnnnnnnnnnnnnnnnnnnnnnnnnnnnnnnnnnnnnnnnnnnnnnnnnnnnnnnnnnnnnnnnnnnnnnnnnnnnnnnnnnnnnnnnnnnnnnnnnnnnnnnnnnnnnnnnnnnnnnnnnnnnnnnnnnnnnnnnnnnnnnnnnnnnnnnnnnnnnnnnnnnnnnnnnnnnnnnnnnnnnnnnnnnnnnnnnnnnnnnnnnnnnnnnnnnnnnnnnnnnnnnnnnnnnnnnnnnnnnnnnnnnnnnnnnnnnnnnnnnnnnnnnnnnnnnnnnnnnnnnnnnnnnnnnnnnnnnnnnnnnnnnnnnnnnnnnnnnnnnnnnnnnnnnnnnnnnnnnnnnnnnnnnnnnnnnnnnnnnnnnnnnnnnnnnnnnnnnnnnnnnnnnnnnnnnnnnnnnnnnnnnnnnnnnnnnnnnnnnnnnnnnnnnnnnnnnnnnnnnnnnnnnnnnnnnnnnnnnnnnnnnnnnnnnnnnnnnnnnnnnnnnnnnnnnnnnnnnnnnnnnnnnnnnnnnnnnnnnnnnnnnnnnnnnnnnnnnnnnnnnnnnnnnnnnnnnnnnnnnnnnnnnnnnnnnnnnnnnnnnnnnnnnnnnnnnnnnnnnnnnnnnnnnnnnnnnnnnnnnnnnnnnnnnnnnnnnnnnnnnnnnnnnnnnnnnnnnnnnnnnnnnnnnnnnnnnnnnnnnnnnnnnnnnnnnnnnnnnnnnnnnnnnnnnnnnnnnnnnnnnnnnnnnnnnnnnnnnnnnnnnnnnnnnnnnnnnnnnnnnnnnnnnnnnnnnnnnnnnnnnnnnnnnnnnnnnnnnnnnnnnnnnnnnnnnnnnnnnnnnnnnnnnnnnnnnnnnnnnnnnnnnnnnnnnnnnnnnnnnnnnnnnnnnnnnnnnnnnnnnnnnnnnnnnnnnnnnnnnnnnnnnnnnnnnnnnnnnnnnnnnnnnnnnnnnnnnnnnnnnnnnnnnnnnnnnnnnnnnnnnnnnnnnnnnnnnnnnnnnnnnnnnnnnnnnnnnnnnnnnnnnnnnnnnnnnnnnnnnnnnnnnnnnnnnnnnnnnnnnnnnnnnnnnnnnnnnnnnnnnnnnnnnnnnnnnnnnnnnnnnnnnnnnnnnnnnnnnnnnnnnnnnnnnnnnnnnnnnnnnnnnnnnnnnnnnnnnnnnnnnnnnnnnnnnnnnnnnnnnnnnnnnnnnnnnnnnnnnnnnnnnnnnnnnnnnnnnnnnnnnnnnnnnnnnnnnnnnnnnnnnnnnnnnnnnnnnnnnnnnnnnnnnnnnnnnnnnnnnnnnnnnnnnnnnnnnnnnnnnnnnnnnnnnnnnnnnnnnnnnnnnnnnnnnnnnnnnnnnnnnnnnnnnnnnnnnnnnnnnnnnnnnnnnnnnnnnnnnnnnnnnnnnnnnnnnnnnnnnnnnnnnnnnnnnnnnnnnnnnnnnnnnnnnnnnnnnnnnnnnnnnnnnnnnnnnnnnnnnnnnnnnnnnnnnnnnnnnnnnnnnnnnnnnnnnnnnnnnnnnnnnnnnnnnnnnnnnnnnnnnnnnnnnnnnnnnnnnnnnnnnnnnnnnnnnnnnnnnnnnnnnnnnnnnnnnnnnnnnnnnnnnnnnnnnnnnnnnnnnnnnnnnnnnnnnnnnnnnnnnnnnnnnnnnnnnnnnnnnnnnnnnnnnnnnnnnnnnnnnnnnnnnnnnnnnnnnnnnnnnnnnnnnnnnnnnnnnnnnnnnnnnnnnnnnnnnnnnnnnnnnnnnnnnnnnnnnnnnnnnnnnnnnnnnnnnnnnnnnnnnnnnnnnnnnnnnnnnnnnnnnnnnnnnnnnnnnnnnnnnnnnnnnnnnnnnnnnnnnnnnnnnnnnnnnnnnnnnnnnnnnnnnnnnnnnnnnnnnnnnnnnnnnnnnnnnnnnnnnnnnnnnnnnnnnnnnnnnnnnnnnnnnnnnnnnnnnnnnnnnnnnnnnnnnnnnnnnnnnnnnnnnnnnnnnnnnnnnnnnnnnnnnnnnnnnnnnnnnnnnnnnnnnnnnnnnnnnnnnnnnnnnnnnnnnnnnnnnnnnnnnnnnnnnnnnnnnnnnnnnnnnnnnnnnnnnnnnnnnnnnnnnnnnnnnnnnnnnnnnnnnnnnnnnnnnnnnnnnnnnnnnnnnnnnnnnnnnnnnnnnnnnnnnnnnnnnnnnnnnnnnnnnnnnnnnnnnnnnnnnnnnnnnnnnnnnnnnnnnnnnnnnnnnnnnnnnnnnnnnnnnnnnnnnnnnnnnnnnnnnnnnnnnnnnnnnnnnnnnnnnnnnnnnnnnnnnnnnnnnnnnnnnnnnnnnnnnnnnnnnnnnnnnnnnnnnnnnnnnnnnnnnnnnnnnnnnnnnnnnnnnnnnnnnnnnnnnnnnnnnnnnnnnnnnnnnnnnnnnnnnnnnnnnnnnnnnnnnnnnnnnnnnnnnnnnnnnnnnnnnnnnnnnnnnnnnnnnnnnnnnnnnnnnnnnnnnnnnnnnnnnnnnnnnnnnnnnnnnnnnnnnnnnnnnnnnnnnnnnnnnnnnnnnnnnnnnnnnnnnnnnnnnnnnnnnnnnnnnnnnnnnnnnnnnnnnnnnnnnnnnnnnnnnnnnnnnnnnnnnnnnnnnnnnnnnnnnnnnnnnnnnnnnnnnnnnnnnnnnnnnnnnnnnnnnnnnnnnnnnnnnnnnnnnnnnnnnnnnnnnnnnnnnnnnnnnnnnnnnnnnnnnnnnnnnnnnnnnnnnnnnnnnnnnnnnnnnnnnnnnnnnnnnnnnnnnnnnnnnnnnnnnnnnnnnnnnnnnnnnnnnnnnnnnnnnnnnnnnnnnnnnnnnnnnnnnnnnnnnnnnnnnnnnnnnnnnnnnnnnnnnnnnnnnnnnnnnnnnnnnnnnnnnnnnnnnnnnnnnnnnnnnnnnnnnnnnnnnnnnnnnnnnnnnnnnnnnnnnnnnnnnnnnnnnnnnnnnnnnnnnnnnnnnnnnnnnnnnnnnnnnnnnnnnnnnnnnnnnnnnnnnnnnnnnnnnnnnnnnnnnnnnnnnnnnnnnnnnnnnnnnnnnnnnnnnnnnnnnnnnnnnnnnnnnnnnnnnnnnnnnnnnnnnnnnnnnnnnnnnnnnnnnnnnnnnnnnnnnnnnnnnnnnnnnnnnnnnnnnnnnnnnnnnnnnnnnnnnnnnnnnnnnnnnnnnnnnnnnnnnnnnnnnnnnnnnnnnnnnnnnnnnnnnnnnnnnnnnnnnnnnnnnnnnnnnnnnnnnnnnnnnnnnnnnnnnnnnnnnnnnnnnnnnnnnnnnnnnnnnnnnnnnnnnnnnnnnnnnnnnnnnnnnnnnnnnnnnnnnnnnnnnnnnnnnnnnnnnnnnnnnnnnnnnnnnnnnnnnnnnnnnnnnnnnnnnnnnnnnnnnnnnnnnnnnnnnnnnnnnnnnnnnnnnnnnnnnnnnnnnnnnnnnnnnnnnnnnnnnnnnnnnnnnnnnnnnnnnnnnnnnnnnnnnnnnnnnnnnnnnnnnnnnnnnnnnnnnnnnnnnnnnnnnnnnnnnnnnnnnnnnnnnnnnnnnnnnnnnnnnnnnnnnnnnnnnnnnnnnnnnnnnnnnnnnnnnnnnnnnnnnnnnnnnnnnnnnnnnnnnnnnnnnnnnnnnnnnnnnnnnnnnnnnnnnnnnnnnnnnnnnnnnnnnnnnnnnnnnnnnnnnnnnnnnnnnnnnnnnnnnnnnnnnnnnnnnnnnnnnnnnnnnnnnnnnnnnnnnnnnnnnnnnnnnnnnnnnnnnnnnnnnnnnnnnnnnnnnnnnnnnnnnnnnnnnnnnnnnnnnnnnnnnnnnnnnnnnnnnnnnnnnnnnnnnnnnnnnnnnnnnnnnnnnnnnnnnnnnnnnnnnnnnnnnnnnnnnnnnnnnnnnnnnnnnnnnnnnnnnnnnnnnnnnnnnnnnnnnnnnnnnnnnnnnnnnnnnnnnnnnnnnnnnnnnnnnnnnnnnnnnnnnnnnnnnnnnnnnnnnnnnnnnnnnnnnnnnnnnnnnnnnnnnnnnnnnnnnnnnnnnnnnnnnnnnnnnnnnnnnnnnnnnnnnnnnnnnnnnnnnnnnnnnnnnnnnnnnnnnnnnnnnnnnnnnnnnnnnnnnnnnnnnnnnnnnnnnnnnnnnnnnnnnnnnnnnnnnnnnnnnnnnnnnnnnnnnnnnnnnnnnnnnnnnnnnnnnnnnnnnnnnnnnnnnnnnnnnnnnnnnnnnnnnnnnnnnnnnnnnnnnnnnnnnnnnnnnnnnnnnnnnnnnnnnnnnnnnnnnnnnnnnnnnnnnnnnnnnnnnnnnnnnnnnnnnnnnnnnnnnnnnnnnnnnnnnnnnnnnnnnnnnnnnnnnnnnnnnnnnnnnnnnnnnnnnnnnnnnnnnnnnnnnnnnnnnnnnnnnnnnnnnnnnnnnnnnnnnnnnnnnnnnnnnnnnnnnnnnnnnnnnnnnnnnnnnnnnnnnnnnnnnnnnnnnnnnnnnnnnnnnnnnnnnnnnnnnnnnnnnnnnnnnnnnnnnnnnnnnnnnnnnnnnnnnnnnnnnnnnnnnnnnnnnnnnnnnnnnnnnnnnnnnnnnnnnnnnnnnnnnnnnnnnnnnnnnnnnnnnnnnnnnnnnnnnnnnnnnnnnnnnnnnnnnnnnnnnnnnnnnnnnnnnnnnnnnnnnnnnnnnnnnnnnnnnnnnnnnnnnnnnnnnnnnnnnnnnnnnnnnnnnnnnnnnnnnnnnnnnnnnnnnnnnnnnnnnnnnnnnnnnnnnnnnnnnnnnnnnnnnnnnnnnnnnnnnnnnnnnnnnnnnnnnnnnnnnnnnnnnnnnnnnnnnnnnnnnnnnnnnnnnnnnnnnnnnnnnnnnnnnnnnnnnnnnnnnnnnnnnnnnnnnnnnnnnnnnnnnnnnnnnnnnnnnnnnnnnnnnnnnnnnnnnnnnnnnnnnnnnnnnnnnnnnnnnnnnnnnnnnnnnnnnnnnnnnnnnnnnnnnnnnnnnnnnnnnnnnnnnnnnnnnnnnnnnnnnnnnnnnnnnnnnnnnnnnnnnnnnnnnnnnnnnnnnnnnnnnnnnnnnnnnnnnnnnnnnnnnnnnnnnnnnnnnnnnnnnnnnnnnnnnnnnnnnnnnnnnnnnnnnnnnnnnnnnnnnnnnnnnnnnnnnnnnnnnnnnnnnnnnnnnnnnnnnnnnnnnnnnnnnnnnnnnnnnnnnnnnnnnnnnnnnnnnnnnnnnnnnnnnnnnnnnnnnnnnnnnnnnnnnnnnnnnnnnnnnnnnnnnnnnnnnnnnnnnnnnnnnnnnnnnnnnnnnnnnnnnnnnnnnnnnnnnnnnnnnnnnnnnnnnnnnnnnnnnnnnnnnnnnnnnnnnnnnnnnnnnnnnnnnnnnnnnnnnnnnnnnnnnnnnnnnnnnnnnnnnnnnnnnnnnnnnnnnnnnnnnnnnnnnnnnnnnnnnnnnnnnnnnnnnnnnnnnnnnnnnnnnnnnnnnnnnnnnnnnnnnnnnnnnnnnnnnnnnnnnnnnnnnnnnnnnnnnnnnnnnnnnnnnnnnnnnnnnnnnnnnnnnnnnnnnnnnnnnnnnnnnnnnnnnnnnnnnnnnnnnnnnnnnnnnnnnnnnnnnnnnnnnnnnnnnnnnnnnnnnnnnnnnnnnnnnnnnnnnnnnnnnnnnnnnnnnnnnnnnnnnnnnnnnnnnnnnnnnnnnnnnnnnnnnnnnnnnnnnnnnnnnnnnnnnnnnnnnnnnnnnnnnnnnnnnnnnnnnnnnnnnnnnnnnnnnnnnnnnnnnnnnnnnnnnnnnnnnnnnnnnnnnnnnnnnnnnnnnnnnnnnnnnnnnnnnnnnnnnnnnnnnnnnnnnnnnnnnnnnnnnnnnnnnnnnnnnnnnnnnnnnnnnnnnnnnnnnnnnnnnnnnnnnnnnnnnnnnnnnnnnnnnnnnnnnnnnnnnnnnnnnnnnnnnnnnnnnnnnnnnnnnnnnnnnnnnnnnnnnnnnnnnnnnnnnnnnnnnnnnnnnnnnnnnnnnnnnnnnnnnnnnnnnnnnnnnnnnnnnnnnnnnnnnnnnnnnnnnnnnnnnnnnnnnnnnnnnnnnnnnnnnnnnnnnnnnnnnnnnnnnnnnnnnnnnnnnnnnnnnnnnnnnnnnnnnnnnnnnnnnnnnnnnnnnnnnnnnnnnnnnnnnnnnnnnnnnnnnnnnnnnnnnnnnnnnnnnnnnnnnnnnnnnnnnnnnnnnnnnnnnnnnnnnnnnnnnnnnnnnnnnnnnnnnnnnnnnnnnnnnnnnnnnnnnnnnnnnnnnnnnnnnnnnnnnnnnnnnnnnnnnnnnnnnnnnnnnnnnnnnnnnnnnnnnnnnnnnnnnnnnnnnnnnnnnnnnnnnnnnnnnnnnnnnnnnnnnnnnnnnnnnnnnnnnnnnnnnnnnnnnnnnnnnnnnnnnnnnnnnnnnnnnnnnnnnnnnnnnnnnnnnnnnnnnnnnnnnnnnnnnnnnnnnnnnnnnnnnnnnnnnnnnnnnnnnnnnnnnnnnnnnnnnnnnnnnnnnnnnnnnnnnnnnnnnnnnnnnnnnnnnnnnnnnnnnnnnnnnnnnnnnnnnnnnnnnnnnnnnnnnnnnnnnnnnnnnnnnnnnnnnnnnnnnnnnnnnnnnnnnnnnnnnnnnnnnnnnnnnnnnnnnnnnnnnnnnnnnnnnnnnnnnnnnnnnnnnnnnnnnnnnnnnnnnnnnnnnnnnnnnnnnnnnnnnnnnnnnnnnnnnnnnnnnnnnnnnnnnnnnnnnnnnnnnnnnnnnnnnnnnnnnnnnnnnnnnnnnnnnnnnnnnnnnnnnnnnnnnnnnnnnnnnnnnnnnnnnnnnnnnnnnnnnnnnnnnnnnnnnnnnnnnnnnnnnnnnnnnnnnnnnnnnnnnnnnnnnnnnnnnnnnnnnnnnnnnnnnnnnnnnnnnnnnnnnnnnnnnnnnnnnnnnnnnnnnnnnnnnnnnnnnnnnnnnnnnnnnnnnnnnnnnnnnnnnnnnnnnnnnnnnnnnnnnnnnnnnnnnnnnnnnnnnnnnnnnnnnnnnnnnnnnnnnnnnnnnnnnnnnnnnnnnnnnnnnnnnnnnnnnnnnnnnnnnnnnnnnnnnnnnnnnnnnnnnnnnnnnnnnnnnnnnnnnnnnnnnnnnnnnnnnnnnnnnnnnnnnnnnnnnnnnnnnnnnnnnnnnnnnnnnnnnnnnnnnnnnnnnnnnnnnnnnnnnnnnnnnnnnnnnnnnnnnnnnnnnnnnnnnnnnnnnnnnnnnnnnnnnnnnnnnnnnnnnnnnnnnnnnnnnnnnnnnnnnnnnnnnnnnnnnnnnnnnnnnnnnnnnnnnnnnnnnnnnnnnnnnnnnnnnnnnnnnnnnnnnnnnnnnnnnnnnnnnnnnnnnnnnnnnnnnnnnnnnnnnnnnnnnnnnnnnnnnnnnnnnnnnnnnnnnnnnnnnnnnnnnnnnnnnnnnnnnnnnnnnnnnnnnnnnnnnnnnnnnnnnnnnnnnnnnnnnnnnnnnnnnnnnnnnnnnnnnnnnnnnnnnnnnnnnnnnnnnnnnnnnnnnnnnnnnnnnnnnnnnnnnnnnnnnnnnnnnnnnnnnnnnnnnnnnnnnnnnnnnnnnnnnnnnnnnnnnnnnnnnnnnnnnnnnnnnnnnnnnnnnnnnnnnnnnnnnnnnnnnnnnnnnnnnnnnnnnnnnnnnnnnnnnnnnnnnnnnnnnnnnnnnnnnnnnnnnnnnnnnnnnnnnnnnnnnnnnnnnnnnnnnnnnnnnnnnnnnnnnnnnnnnnnnnnnnnnnnnnnnnnnnnnnnnnnnnnnnnnnnnnnnnnnnnnnnnnnnnnnnnnnnnnnnnnnnnnnnnnnnnnnnnnnnnnnnnnnnnnnnnnnnnnnnnnnnnnnnnnnnnnnnnnnnnnnnnnnnnnnnnnnnnnnnnnnnnnnnnnnnnnnnnnnnnnnnnnnnnnnnnnnnnnnnnnnnnnnnnnnnnnnnnnnnnnnnnnnnnnnnnnnnnnnnnnnnnnnnnnnnnnnnnnnnnnnnnnnnnnnnnnnnnnnnnnnnnnnnnnnnnnnnnnnnnnnnnnnnnnnnnnnnnnnnnnnnnnnnnnnnnnnnnnnnnnnnnnnnnnnnnnnnnnnnnnnnnnnnnnnnnnnnnnnnnnnnnnnnnnnnnnnnnnnnnnnnnnnnnnnnnnnnnnnnnnnnnnnnnnnnnnnnnnnnnnnnnnnnnnnnnnnnnnnnnnnnnnnnnnnnnnnnnnnnnnnnnnnnnnnnnnnnnnnnnnnnnnnnnnnnnnnnnnnnnnnnnnnnnnnnnnnnnnnnnnnnnnnnnnnnnnnnnnnnnnnnnnnnnnnnnnnnnnnnnnnnnnnnnnnnnnnnnnnnnnnnnnnnnnnnnnnnnnnnnnnnnnnnnnnnnnnnnnnnnnnnnnnnnnnnnnnnnnnnnnnnnnnnnnnnnnnnnnnnnnnnnnnnnnnnnnnnnnnnnnnnnnnnnnnnnnnnnnnnnnnnnnnnnnnnnnnnnnnnnnnnnnnnnnnnnnnnnnnnnnnnnnnnnnnnnnnnnnnnnnnnnnnnnnnnnnnnnnnnnnnnnnnnnnnnnnnnnnnnnnnnnnnnnnnnnnnnnnnnnnnnnnnnnnnnnnnnnnnnnnnnnnnnnnnnnnnnnnnnnnnnnnnnnnnnnnnnnnnnnnnnnnnnnnnnnnnnnnnnnnnnnnnnnnnnnnnnnnnnnnnnnnnnnnnnnnnnnnnnnnnnnnnnnnnnnnnnnnnnnnnnnnnnnnnnnnnnnnnnnnnnnnnnnnnnnnnnnnnnnnnnnnnnnnnnnnnnnnnnnnnnnnnnnnnnnnnnnnnnnnnnnnnnnnnnnnnnnnnnnnnnnnnnnnnnnnnnnnnnnnnnnnnnnnnnnnnnnnnnnnnnnnnnnnnnnnnnnnnnnnnnnnnnnnnnnnnnnnnnnnnnnnnnnnnnnnnnnnnnnnnnnnnnnnnnnnnnnnnnnnnnnnnnnnnnnnnnnnnnnnnnnnnnnnnnnnnnnnnnnnnnnnnnnnnnnnnnnnnnnnnnnnnnnnnnnnnnnnnnnnnnnnnnnnnnnnnnnnnnnnnnnnnnnnnnnnnnnnnnnnnnnnnnnnnnnnnnnnnnnnnnnnnnnnnnnnnnnnnnnnnnnnnnnnnnnnnnnnnnnnnnnnnnnnnnnnnnnnnnnnnnnnnnnnnnnnnnnnnnnnnnnnnnnnnnnnnnnnnnnnnnnnnnnnnnnnnnnnnnnnnnnnnnnnnnnnnnnnnnnnnnnnnnnnnnnnnnnnnnnnnnnnnnnnnnnnnnnnnnnnnnnnnnnnnnnnnnnnnnnnnnnnnnnnnnnnnnnnnnnnnnnnnnnnnnnnnnnnnnnnnnnnnnnnnnnnnnnnnnnnnnnnnnnnnnnnnnnnnnnnnnnnnnnnnnnnnnnnnnnnnnnnnnnnnnnnnnnnnnnnnnnnnnnnnnnnnnnnnnnnnnnnnnnnnnnnnnnnnnnnnnnnnnnnnnnnnnnnnnnnnnnnnnnnnnnnnnnnnnnnnnnnnnnnnnnnnnnnnnnnnnnnnnnnnnnnnnnnnnnnnnnnnnnnnnnnnnnnnnnnnnnnnnnnnnnnnnnnnnnnnnnnnnnnnnnnnnnnnnnnnnnnnnnnnnnnnnnnnnnnnnnnnnnnnnnnnnnnnnnnnnnnnnnnnnnnnnnnnnnnnnnnnnnnnnnnnnnnnnnnnnnnnnnnnnnnnnnnnnnnnnnnnnnnnnnnnnnnnnnnnnnnnnnnnnnnnnnnnnnnnnnnnnnnnnnnnnnnnnnnnnnnnnnnnnnnnnnnnnnnnnnnnnnnnnnnnnnnnnnnnnnnnnnnnnnnnnnnnnnnnnnnnnnnnnnnnnnnnnnnnnnnnnnnnnnnnnnnnnnnnnnnnnnnnnnnnnnnnnnnnnnnnnnnnnnnnnnnnnnnnnnnnnnnnnnnnnnnnnnnnnnnnnnnnnnnnnnnnnnnnnnnnnnnnnnnnnnnnnnnnnnnnnnnnnnnnnnnnnnnnnnnnnnnnnnnnnnnnnnnnnnnnnnnnnnnnnnnnnnnnnnnnnnnnnnnnnnnnnnnnnnnnnnnnnnnnnnnnnnnnnnnnnnnnnnnnnnnnnnnnnnnnnnnnnnnnnnnnnnnnnnnnnnnnnnnnnnnnnnnnnnnnnnnnnnnnnnnnnnnnnnnnnnnnnnnnnnnnnnnnnnnnnnnnnnnnnnnnnnnnnnnnnnnnnnnnnnnnnnnnnnnnnnnnnnnnnnnnnnnnnnnnnnnnnnnnnnnnnnnnnnnnnnnnnnnnnnnnnnnnnnnnnnnnnnnnnnnnnnnnnnnnnnnnnnnnnnnnnnnnnnnnnnnnnnnnnnnnnnnnnnnnnnnnnnnnnnnnnnnnnnnnnnnnnnnnnnnnnnnnnnnnnnnnnnnnnnnnnnnnnnnnnnnnnnnnnnnnnnnnnnnnnnnnnnnnnnnnnnnnnnnnnnnnnnnnnnnnnnnnnnnnnnnnnnnnnnnnnnnnnnnnnnnnnnnnnnnnnnnnnnnnnnnnnnnnnnnnnnnnnnnnnnnnnnnnnnnnnnnnnnnnnnnnnnnnnnnnnnnnnnnnnnnnnnnnnnnnnnnnnnnnnnnnnnnnnnnnnnnnnnnnnnnnnnnnnnnnnnnnnnnnnnnnnnnnnnnnnnnnnnnnnnnnnnnnnnnnnnnnnnnnnnnnnnnnnnnnnnnnnnnnnnnnnnnnnnnnnnnnnnnnnnnnnnnnnnnnnnnnnnnnnnnnnnnnnnnnnnnnnnnnnnnnnnnnnnnnnnnnnnnnnnnnnnnnnnnnnnnnnnnnnnnnnnnnnnnnnnnnnnnnnnnnnnnnnnnnnnnnnnnnnnnnnnnnnnnnnnnnnnnnnnnnnnnnnnnnnnnnnnnnnnnnnnnnnnnnnnnnnnnnnnnnnnnnnnnnnnnnnnnnnnnnnnnnnnnnnnnnnnnnnnnnnnnnnnnnnnnnnnnnnnnnnnnnnnnnnnnnnnnnnnnnnnnnnnnnnnnnnnnnnnnnnnnnnnnnnnnnnnnnnnnnnnnnnnnnnnnnnnnnnnnnnnnnnnnnnnnnnnnnnnnnnnnnnnnnnnnnnnnnnnnnnnnnnnnnnnnnnnnnnnnnnnnnnnnnnnnnnnnnnnnnnnnnnnnnnnnnnnnnnnnnnnnnnnnnnnnnnnnnnnnnnnnnnnnnnnnnnnnnnnnnnnnnnnnnnnnnnnnnnnnnnnnnnnnnnnnnnnnnnnnnnnnnnnnnnnnnnnnnnnnnnnnnnnnnnnnnnnnnnnnnnnnnnnnnnnnnnnnnnnnnnnnnnnnnnnnnnnnnnnnnnnnnnnnnnnnnnnnnnnnnnnnnnnnnnnnnnnnnnnnnnnnnnnnnnnnnnnnnnnnnnnnnnnnnnnnnnnnnnnnnnnnnnnnnnnnnnnnnnnnnnnnnnnnnnnnnnnnnnnnnnnnnnnnnnnnnnnnnnnnnnnnnnnnnnnnnnnnnnnnnnnnnnnnnnnnnnnnnnnnnnnnnnnnnnnnnnnnnnnnnnnnnnnnnnnnnnnnnnnnnnnnnnnnnnnnnnnnnnnnnnnnnnnnnnnnnnnnnnnnnnnnnnnnnnnnnnnnnnnnnnnnnnnnnnnnnnnnnnnnnnnnnnnnnnnnnnnnnnnnnnnnnnnnnnnnnnnnnnnnnnnnnnnnnnnnnnnnnnnnnnnnnnnnnnnnnnnnnnnnnnnnnnnnnnnnnnnnnnnnnnnnnnnnnnnnnnnnnnnnnnnnnnnnnnnnnnnnnnnnnnnnnnnnnnnnnnnnnnnnnnnnnnnnnnnnnnnnnnnnnnnnnnnnnnnnnnnnnnnnnnnnnnnnnnnnnnnnnnnnnnnnnnnnnnnnnnnnnnnnnnnnnnnnnnnnnnnnnnnnnnnnnnnnnnnnnnnnnnnnnnnnnnnnnnnnnnnnnnnnnnnnnnnnnnnnnnnnnnnnnnnnnnnnnnnnnnnnnnnnnnnnnnnnnnnnnnnnnnnnnnnnnnnnnnnnnnnnnnnnnnnnnnnnnnnnnnnnnnnnnnnnnnnnnnnnnnnnnnnnnnnnnnnnnnnnnnnnnnnnnnnnnnnnnnnnnnnnnnnnnnnnnnnnnnnnnnnnnnnnnnnnnnnnnnnnnnnnnnnnnnnnnnnnnnnnnnnnnnnnnnnnnnnnnnnnnnnnnnnnnnnnnnnnnnnnnnnnnnnnnnnnnnnnnnnnnnnnnnnnnnnnnnnnnnnnnnnnnnnnnnnnnnnnnnnnnnnnnnnnnnnnnnnnnnnnnnnnnnnnnnnnnnnnnnnnnnnnnnnnnnnnnnnnnnnnnnnnnnnnnnnnnnnnnnnnnnnnnnnnnnnnnnnnnnnnnnnnnnnnnnnnnnnnnnnnnnnnnnnnnnnnnnnnnnnnnnnnnnnnnnnnnnnnnnnnnnnnnnnnnnnnnnnnnnnnnnnnnnnnnnnnnnnnnnnnnnnnnnnnnnnnnnnnnnnnnnnnnnnnnnnnnnnnnnnnnnnnnnnnnnnnnnnnnnnnnnnnnnnnnnnnnnnnnnnnnnnnnnnnnnnnnnnnnnnnnnnnnnnnnnnnnnnnnnnnnnnnnnnnnnnnnnnnnnnnnnnnnnnnnnnnnnnnnnnnnnnnnnnnnnnnnnnnnnnnnnnnnnnnnnnnnnnnnnnnnnnnnnnnnnnnnnnnnnnnnnnnnnnnnnnnnnnnnnnnnnnnnnnnnnnnnnnnnnnnnnnnnnnnnnnnnnnnnnnnnnnnnnnnnnnnnnnnnnnnnnnnnnnnnnnnnnnnnnnnnnnnnnnnnnnnnnnnnnnnnnnnnnnnnnnnnnnnnnnnnnnnnnnnnnnnnnnnnnnnnnnnnnnnnnnnnnnnnnnnnnnnnnnnnnnnnnnnnnnnnnnnnnnnnnnnnnnnnnnnnnnnnnnnnnnnnnnnnnnnnnnnnnnnnnnnnnnnnnnnnnnnnnnnnnnnnnnnnnnnnnnnnnnnnnnnnnnnnnnnnnnnnnnnnnnnnnnnnnnnnnnnnnnnnnnnnnnnnnnnnnnnnnnnnnnnnnnnnnnnnnnnnnnnnnnnnnnnnnnnnnnnnnnnnnnnnnnnnnnnnnnnnnnnnnnnnnnnnnnnnnnnnnnnnnnnnnnnnnnnnnnnnnnnnnnnnnnnnnnnnnnnnnnnnnnnnnnnnnnnnnnnnnnnnnnnnnnnnnnnnnnnnnnnnnnnnnnnnnnnnnnnnnnnnnnnnnnnnnnnnnnnnnnnnnnnnnnnnnnnnnnnnnnnnnnnnnnnnnnnnnnnnnnnnnnnnnnnnnnnnnnnnnnnnnnnnnnnnnnnnnnnnnnnnnnnnnnnnnnnnnnnnnnnnnnnnnnnnnnnnnnnnnnnnnnnnnnnnnnnnnnnnnnnnnnnnnnnnnnnnnnnnnnnnnnnnnnnnnnnnnnnnnnnnnnnnnnnnnnnnnnnnnnnnnnnnnnnnnnnnnnnnnnnnnnnnnnnnnnnnnnnnnnnnnnnnnnnnnnnnnnnnnnnnnnnnnnnnnnnnnnnnnnnnnnnnnnnnnnnnnnnnnnnnnnnnnnnnnnnnnnnnnnnnnnnnnnnnnnnnnnnnnnnnnnnnnnnnnnnnnnnnnnnnnnnnnnnnnnnnnnnnnnnnnnnnnnnnnnnnnnnnnnnnnnnnnnnnnnnnnnnnnnnnnnnnnnnnnnnnnnnnnnnnnnnnnnnnnnnnnnnnnnnnnnnnnnnnnnnnnnnnnnnnnnnnnnnnnnnnnnnnnnnnnnnnnnnnnnnnnnnnnnnnnnnnnnnnnnnnnnnnnnnnnnnnnnnnnnnnnnnnnnnnnnnnnnnnnnnnnnnnnnnnnnnnnnnnnnnnnnnnnnnnnnnnnnnnnnnnnnnnnnnnnnnnnnnnnnnnnnnnnnnnnnnnnnnnnnnnnnnnnnnnnnnnnnnnnnnnnnnnnnnnnnnnnnnnnnnnnnnnnnnnnnnnnnnnnnnnnnnnnnnnnnnnnnnnnnnnnnnnnnnnnnnnnnnnnnnnnnnnnnnnnnnnnnnnnnnnnnnnnnnnnnnnnnnnnnnnnnnnnnnnnnnnnnnnnnnnnnnnnnnnnnnnnnnnnnnnnnnnnnnnnnnnnnnnnnnnnnnnnnnnnnnnnnnnnnnnnnnnnnnnnnnnnnnnnnnnnnnnnnnnnnnnnnnnnnnnnnnnnnnnnnnnnnnnnnnnnnnnnnnnnnnnnnnnnnnnnnnnnnnnnnnnnnnnnnnnnnnnnnnnnnnnnnnnnnnnnnnnnnnnnnnnnnnnnnnnnnnnnnnnnnnnnnnnnnnnnnnnnnnnnnnnnnnnnnnnnnnnnnnnnnnnnnnnnnnnnnnnnnnnnnnnnnnnnnnnnnnnnnnnnnnnnnnnnnnnnnnnnnnnnnnnnnnnnnnnnnnnnnnnnnnnnnnnnnnnnnnnnnnnnnnnnnnnnnnnnnnnnnnnnnnnnnnnnnnnnnnnnnnnnnnnnnnnnnnnnnnnnnnnnnnnnnnnnnnnnnnnnnnnnnnnnnnnnnnnnnnnnnnnnnnnnnnnnnnnnnnnnnnnnnnnnnnnnnnnnnnnnnnnnnnnnnnnnnnnnnnnnnnnnnnnnnnnnnnnnnnnnnnnnnnnnnnnnnnnnnnnnnnnnnnnnnnnnnnnnnnnnnnnnnnnnnnnnnnnnnnnnnnnnnnnnnnnnnnnnnnnnnnnnnnnnnnnnnnnnnnnnnnnnnnnnnnnnnnnnnnnnnnnnnnnnnnnnnnnnnnnnnnnnnnnnnnnnnnnnnnnnnnnnnnnnnnnnnnnnnnnnnnnnnnnnnnnnnnnnnnnnnnnnnnnnnnnnnnnnnnnnnnnnnnnnnnnnnnnnnnnnnnnnnnnnnnnnnnnnnnnnnnnnnnnnnnnnnnnnnnnnnnnnnnnnnnnnnnnnnnnnnnnnnnnnnnnnnnnnnnnnnnnnnnnnnnnnnnnnnnnnnnnnnnnnnnnnnnnnnnnnnnnnnnnnnnnnnnnnnnnnnnnnnnnnnnnnnnnnnnnnnnnnnnnnnnnnnnnnnnnnnnnnnnnnnnnnnnnnnnnnnnnnnnnnnnnnnnnnnnnnnnnnnnnnnnnnnnnnnnnnnnnnnnnnnnnnnnnnnnnnnnnnnnnnnnnnnnnnnnnnnnnnnnnnnnnnnnnnnnnnnnnnnnnnnnnnnnnnnnnnnnnnnnnnnnnnnnnnnnnnnnnnnnnnnnnnnnnnnnnnnnnnnnnnnnnnnnnnnnnnnnnnnnnnnnnnnnnnnnnnnnnnnnnnnnnnnnnnnnnnnnnnnnnnnnnnnnnnnnnnnnnnnnnnnnnnnnnnnnnnnnnnnnnnnnnnnnnnnnnnnnnnnnnnnnnnnnnnnnnnnnnnnnnnnnnnnnnnnnnnnnnnnnnnnnnnnnnnnnnnnnnnnnnnnnnnnnnnnnnnnnnnnnnnnnnnnnnnnnnnnnnnnnnnnnnnnnnnnnnnnnnnnnnnnnnnnnnnnnnnnnnnnnnnnnnnnnnnnnnnnnnnnnnnnnnnnnnnnnnnnnnnnnnnnnnnnnnnnnnnnnnnnnnnnnnnnnnnnnnnnnnnnnnnnnnnnnnnnnnnnnnnnnnnnnnnnnnnnnnnnnnnnnnnnnnnnnnnnnnnnnnnnnnnnnnnnnnnnnnnnnnnnnnnnnnnnnnnnnnnnnnnnnnnnnnnnnnnnnnnnnnnnnnnnnnnnnnnnnnnnnnnnnnnnnnnnnnnnnnnnnnnnnnnnnnnnnnnnnnnnnnnnnnnnnnnnnnnnnnnnnnnnnnnnnnnnnnnnnnnnnnnnnnnnnnnnnnnnnnnnnnnnnnnnnnnnnnnnnnnnnnnnnnnnnnnnnnnnnnnnnnnnnnnnnnnnnnnnnnnnnnnnnnnnnnnnnnnnnnnnnnnnnnnnnnnnnnnnnnnnnnnnnnnnnnnnnnnnnnnnnnnnnnnnnnnnnnnnnnnnnnnnnnnnnnnnnnnnnnnnnnnnnnnnnnnnnnnnnnnnnnnnnnnnnnnnnnnnnnnnnnnnnnnnnnnnnnnnnnnnnnnnnnnnnnnnnnnnnnnnnnnnnnnnnnnnnnnnnnnnnnnnnnnnnnnnnnnnnnnnnnnnnnnnnnnnnnnnnnnnnnnnnnnnnnnnnnnnnnnnnnnnnnnnnnnnnnnnnnnnnnnnnnnnnnnnnnnnnnnnnnnnnnnnnnnnnnnnnnnnnnnnnnnnnnnnnnnnnnnnnnnnnnnnnnnnnnnnnnnnnnnnnnnnnnnnnnnnnnnnnnnnnnnnnnnnnnnnnnnnnnnnnnnnnnnnnnnnnnnnnnnnnnnnnnnnnnnnnnnnnnnnnnnnnnnnnnnnnnnnnnnnnnnnnnnnnnnnnnnnnnnnnnnnnnnnnnnnnnnnnnnnnnnnnnnnnnnnnnnnnnnnnnnnnnnnnnnnnnnnnnnnnnnnnnnnnnnnnnnnnnnnnnnnnnnnnnnnnnnnnnnnnnnnnnnnnnnnnnnnnnnnnnnnnnnnnnnnnnnnnnnnnnnnnnnnnnnnnnnnnnnnnnnnnnnnnnnnnnnnnnnnnnnnnnnnnnnnnnnnnnnnnnnnnnnnnnnnnnnnnnnnnnnnnnnnnnnnnnnnnnnnnnnnnnnnnnnnnnnnnnnnnnnnnnnnnnnnnnnnnnnnnnnnnnnnnnnnnnnnnnnnnnnnnnnnnnnnnnnnnnnnnnnnnnnnnnnnnnnnnnnnnnnnnnnnnnnnnnnnnnnnnnnnnnnnnnnnnnnnnnnnnnnnnnnnnnnnnnnnnnnnnnnnnnnnnnnnnnnnnnnnnnnnnnnnnnnnnnnnnnnnnnnnnnnnnnnnnnnnnnnnnnnnnnnnnnnnnnnnnnnnnnnnnnnnnnnnnnnnnnnnnnnnnnnnnnnnnnnnnnnnnnnnnnnnnnnnnnnnnnnnnnnnnnnnnnnnnnnnnnnnnnnnnnnnnnnnnnnnnnnnnnnnnnnnnnnnnnnnnnnnnnnnnnnnnnnnnnnnnnnnnnnnnnnnnnnnnnnnnnnnnnnnnnnnnnnnnnnnnnnnnnnnnnnnnnnnnnnnnnnnnnnnnnnnnnnnnnnnnnnnnnnnnnnnnnnnnnnnnnnnnnnnnnnnnnnnnnnnnnnnnnnnnnnnnnnnnnnnnnnnnnnnnnnnnnnnnnnnnnnnnnnnnnnnnnnnnnnnnnnnnnnnnnnnnnnnnnnnnnnnnnnnnnnnnnnnnnnnnnnnnnnnnnnnnnnnnnnnnnnnnnnnnnnnnnnnnnnnnnnnnnnnnnnnnnnnnnnnnnnnnnnnnnnnnnnnnnnnnnnnnnnnnnnnnnnnnnnnnnnnnnnnnnnnnnnnnnnnnnnnnnnnnnnnnnnnnnnnnnnnnnnnnnnnnnnnnnnnnnnnnnnnnnnnnnnnnnnnnnnnnnnnnnnnnnnnnnnnnnnnnnnnnnnnnnnnnnnnnnnnnnnnnnnnnnnnnnnnnnnnnnnnnnnnnnnnnnnnnnnnnnnnnnnnnnnnnnnnnnnnnnnnnnnnnnnnnnnnnnnnnnnnnnnnnnnnnnnnnnnnnnnnnnnnnnnnnnnnnnnnnnnnnnnnnnnnnnnnnnnnnnnnnnnnnnnnnnnnnnnnnnnnnnnnnnnnnnnnnnnnnnnnnnnnnnnnnnnnnnnnnnnnnnnnnnnnnnnnnnnnnnnnnnnnnnnnnnnnnnnnnnnnnnnnnnnnnnnnnnnnnnnnnnnnnnnnnnnnnnnnnnnnnnnnnnnnnnnnnnnnnnnnnnnnnnnnnnnnnnnnnnnnnnnnnnnnnnnnnnnnnnnnnnnnnnnnnnnnnnnnnnnnnnnnnnnnnnnnnnnnnnnnnnnnnnnnnnnnnnnnnnnnnnnnnnnnnnnnnnnnnnnnnnnnnnnnnnnnnnnnnnnnnnnnnnnnnnnnnnnnnnnnnnnnnnnnnnnnnnnnnnnnnnnnnnnnnnnnnnnnnnnnnnnnnnnnnnnnnnnnnnnnnnnnnnnnnnnnnnnnnnnnnnnnnnnnnnnnnnnnnnnnnnnnnnnnnnnnnnnnnnnnnnnnnnnnnnnnnnnnnnnnnnnnnnnnnnnnnnnnnnnnnnnnnnnnnnnnnnnnnnnnnnnnnnnnnnnnnnnnnnnnnnnnnnnnnnnnnnnnnnnnnnnnnnnnnnnnnnnnnnnnnnnnnnnnnnnnnnnnnnnnnnnnnnnnnnnnnnnnnnnnnnnnnnnnnnnnnnnnnnnnnnnnnnnnnnnnnnnnnnnnnnnnnnnnnnnnnnnnnnnnnnnnnnnnnnnnnnnnnnnnnnnnnnnnnnnnnnnnnnnnnnnnnnnnnnnnnnnnnnnnnnnnnnnnnnnnnnnnnnnnnnnnnnnnnnnnnnnnnnnnnnnnnnnnnnnnnnnnnnnnnnnnnnnnnnnnnnnnnnnnnnnnnnnnnnnnnnnnnnnnnnnnnnnnnnnnnnnnnnnnnnnnnnnnnnnnnnnnnnnnnnnnnnnnnnnnnnnnnnnnnnnnnnnnnnnnnnnnnnnnnnnnnnnnnnnnnnnnnnnnnnnnnnnnnnnnnnnnnnnnnnnnnnnnnnnnnnnnnnnnnnnnnnnnnnnnnnnnnnnnnnnnnnnnnnnnnnnnnnnnnnnnnnnnnnnnnnnnnnnnnnnnnnnnnnnnnnnnnnnnnnnnnnnnnnnnnnnnnnnnnnnnnnnnnnnnnnnnnnnnnnnnnnnnnnnnnnnnnnnnnnnnnnnnnnnnnnnnnnnnnnnnnnnnnnnnnnnnnnnnnnnnnnnnnnnnnnnnnnnnnnnnnnnnnnnnnnnnnnnnnnnnnnnnnnnnnnnnnnnnnnnnnnnnnnnnnnnnnnnnnnnnnnnnnnnnnnnnnnnnnnnnnnnnnnnnnnnnnnnnnnnnnnnnnnnnnnnnnnnnnnnnnnnnnnnnnnnnnnnnnnnnnnnnnnnnnnnnnnnnnnnnnnnnnnnnnnnnnnnnnnnnnnnnnnnnnnnnnnnnnnnnnnnnnnnnnnnnnnnnnnnnnnnnnnnnnnnnnnnnnnnnnnnnnnnnnnnnnnnnnnnnnnnnnnnnnnnnnnnnnnnnnnnnnnnnnnnnnnnnnnnnnnnnnnnnnnnnnnnnnnnnnnnnnnnnnnnnnnnnnnnnnnnnnnnnnnnnnnnnnnnnnnnnnnnnnnnnnnnnnnnnnnnnnnnnnnnnnnnnnnnnnnnnnnnnnnnnnnnnnnnnnnnnnnnnnnnnnnnnnnnnnnnnnnnnnnnnnnnnnnnnnnnnnnnnnnnnnnnnnnnnnnnnnnnnnnnnnnnnnnnnnnnnnnnnnnnnnnnnnnnnnnnnnnnnnnnnnnnnnnnnnnnnnnnnnnnnnnnnnnnnnnnnnnnnnnnnnnnnnnnnnnnnnnnnnnnnnnnnnnnnnnnnnnnnnnnnnnnnnnnnnnnnnnnnnnnnnnnnnnnnnnnnnnnnnnnnnnnnnnnnnnnnnnnnnnnnnnnnnnnnnnnnnnnnnnnnnnnnnnnnnnnnnnnnnnnnnnnnnnnnnnnnnnnnnnnnnnnnnnnnnnnnnnnnnnnnnnnnnnnnnnnnnnnnnnnnnnnnnnnnnnnnnnnnnnnnnnnnnnnnnnnnnnnnnnnnnnnnnnnnnnnnnnnnnnnnnnnnnnnnnnnnnnnnnnnnnnnnnnnnnnnnnnnnnnnnnnnnnnnnnnnnnnnnnnnnnnnnnnnnnnnnnnnnnnnnnnnnnnnnnnnnnnnnnnnnnnnnnnnnnnnnnnnnnnnnnnnnnnnnnnnnnnnnnnnnnnnnnnnnnnnnnnnnnnnnnnnnnnnnnnnnnnnnnnnnnnnnnnnnnnnnnnnnnnnnnnnnnnnnnnnnnnnnnnnnnnnnnnnnnnnnnnnnnnnnnnnnnnnnnnnnnnnnnnnnnnnnnnnnnnnnnnnnnnnnnnnnnnnnnnnnnnnnnnnnnnnnnnnnnnnnnnnnnnnnnnnnnnnnnnnnnnnnnnnnnnnnnnnnnnnnnnnnnnnnnnnnnnnnnnnnnnnnnnnnnnnnnnnnnnnnnnnnnnnnnnnnnnnnnnnnnnnnnnnnnnnnnnnnnnnnnnnnnnnnnnnnnnnnnnnnnnnnnnnnnnnnnnnnnnnnnnnnnnnnnnnnnnnnnnnnnnnnnnnnnnnnnnnnnnnnnnnnnnnnnnnnnnnnnnnnnnnnnnnnnnnnnnnnnnnnnnnnnnnnnnnnnnnnnnnnnnnnnnnnnnnnnnnnnnnnnnnnnnnnnnnnnnnnnnnnnnnnnnnnnnnnnnnnnnnnnnnnnnnnnnnnnnnnnnnnnnnnnnnnnnnnnnnnnnnnnnnnnnnnnnnnnnnnnnnnnnnnnnnnnnnnnnnnnnnnnnnnnnnnnnnnnnnnnnnnnnnnnnnnnnnnnnnnnnnnnnnnnnnnnnnnnnnnnnnnnnnnnnnnnnnnnnnnnnnnnnnnnnnnnnnnnnnnnnnnnnnnnnnnnnnnnnnnnnnnnnnnnnnnnnnnnnnnnnnnnnnnnnnnnnnnnnnnnnnnnnnnnnnnnnnnnnnnnnnnnnnnnnnnnnnnnnnnnnnnnnnnnnnnnnnnnnnnnnnnnnnnnnnnnnnnnnnnnnnnnnnnnnnnnnnnnnnnnnnnnnnnnnnnnnnnnnnnnnnnnnnnnnnnnnnnnnnnnnnnnnnnnnnnnnnnnnnnnnnnnnnnnnnnnnnnnnnnnnnnnnnnnnnnnnnnnnnnnnnnnnnnnnnnnnnnnnnnnnnnnnnnnnnnnnnnnnnnnnnnnnnnnnnnnnnnnnnnnnnnnnnnnnnnnnnnnnnnnnnnnnnnnnnnnnnnnnnnnnnnnnnnnnnnnnnnnnnnnnnnnnnnnnnnnnnnnnnnnnnnnnnnnnnnnnnnnnnnnnnnnnnnnnnnnnnnnnnnnnnnnnnnnnnnnnnnnnnnnnnnnnnnnnnnnnnnnnnnnnnnnnnnnnnnnnnnnnnnnnnnnnnnnnnnnnnnnnnnnnnnnnnnnnnnnnnnnnnnnnnnnnnnnnnnnnnnnnnnnnnnnnnnnnnnnnnnnnnnnnnnnnnnnnnnnnnnnnnnnnnnnnnnnnnnnnnnnnnnnnnnnnnnnnnnnnnnnnnnnnnnnnnnnnnnnnnnnnnnnnnnnnnnnnnnnnnnnnnnnnnnnnnnnnnnnnnnnnnnnnnnnnnnnnnnnnnnnnnnnnnnnnnnnnnnnnnnnnnnnnnnnnnnnnnnnnnnnnnnnnnnnnnnnnnnnnnnnnnnnnnnnnnnnnnnnnnnnnnnnnnnnnnnnnnnnnnnnnnnnnnnnnnnnnnnnnnnnnnnnnnnnnnnnnnnnnnnnnnnnnnnnnnnnnnnnnnnnnnnnnnnnnnnnnnnnnnnnnnnnnnnnnnnnnnnnnnnnnnnnnnnnnnnnnnnnnnnnnnnnnnnnnnnnnnnnnnnnnnnnnnnnnnnnnnnnnnnnnnnnnnnnnnnnnnnnnnnnnnnnnnnnnnnnnnnnnnnnnnnnnnnnnnnnnnnnnnnnnnnnnnnnnnnnnnnnnnnnnnnnnnnnnnnnnnnnnnnnnnnnnnnnnnnnnnnnnnnnnnnnnnnnnnnnnnnnnnnnnnnnnnnnnnnnnnnnnnnnnnnnnnnnnnnnnnnnnnnnnnnnnnnnnnnnnnnnnnnnnnnnnnnnnnnnnnnnnnnnnnnnnnnnnnnnnnnnnnnnnnnnnnnnnnnnnnnnnnnnnnnnnnnnnnnnnnnnnnnnnnnnnnnnnnnnnnnnnnnnnnnnnnnnnnnnnnnnnnnnnnnnnnnnnnnnnnnnnnnnnnnnnnnnnnnnnnnnnnnnnnnnnnnnnnnnnnnnnnnnnnnnnnnnnnnnnnnnnnnnnnnnnnnnnnnnnnnnnnnnnnnnnnnnnnnnnnnnnnnnnnnnnnnnnnnnnnnnnnnnnnnnnnnnnnnnnnnnnnnnnnnnnnnnnnnnnnnnnnnnnnnnnnnnnnnnnnnnnnnnnnnnnnnnnnnnnnnnnnnnnnnnnnnnnnnnnnnnnnnnnnnnnnnnnnnnnnnnnnnnnnnnnnnnnnnnnnnnnnnnnnnnnnnnnnnnnnnnnnnnnnnnnnnnnnnnnnnnnnnnnnnnnnnnnnnnnnnnnnnnnnnnnnnnnnnnnnnnnnnnnnnnnnnnnnnnnnnnnnnnnnnnnnnnnnnnnnnnnnnnnnnnnnnnnnnnnnnnnnnnnnnnnnnnnnnnnnnnnnnnnnnnnnnnnnnnnnnnnnnnnnnnnnnnnnnnnnnnnnnnnnnnnnnnnnnnnnnnnnnnnnnnnnnnnnnnnnnnnnnnnnnnnnnnnnnnnnnnnnnnnnnnnnnnnnnnnnnnnnnnnnnnnnnnnnnnnnnnnnnnnnnnnnnnnnnnnnnnnnnnnnnnnnnnnnnnnnnnnnnnnnnnnnnnnnnnnnnnnnnnnnnnnnnnnnnnnnnnnnnnnnnnnnnnnnnnnnnnnnnnnnnnnnnnnnnnnnnnnnnnnnnnnnnnnnnnnnnnnnnnnnnnnnnnnnnnnnnnnnnnnnnnnnnnnnnnnnnnnnnnnnnnnnnnnnnnnnnnnnnnnnnnnnnnnnnnnnnnnnnnnnnnnnnnnnnnnnnnnnnnnnnnnnnnnnnnnnnnnnnnnnnnnnnnnnnnnnnnnnnnnnnnnnnnnnnnnnnnnnnnnnnnnnnnnnnnnnnnnnnnnnnnnnnnnnnnnnnnnnnnnnnnnnnnnnnnnnnnnnnnnnnnnnnnnnnnnnnnnnnnnnnnnnnnnnnnnnnnnnnnnnnnnnnnnnnnnnnnnnnnnnnnnnnnnnnnnnnnnnnnnnnnnnnnnnnnnnnnnnnnnnnnnnnnnnnnnnnnnnnnnnnnnnnnnnnnnnnnnnnnnnnnnnnnnnnnnnnnnnnnnnnnnnnnnnnnnnnnnnnnnnnnnnnnnnnnnnnnnnnnnnnnnnnnnnnnnnnnnnnnnnnnnnnnnnnnnnnnnnnnnnnnnnnnnnnnnnnnnnnnnnnnnnnnnnnnnnnnnnnnnnnnnnnnnnnnnnnnnnnnnnnnnnnnnnnnnnnnnnnnnnnnnnnnnnnnnnnnnnnnnnnnnnnnnnnnnnnnnnnnnnnnnnnnnnnnnnnnnnnnnnnnnnnnnnnnnnnnnnnnnnnnnnnnnnnnnnnnnnnnnnnnnnnnnnnnnnnnnnnnnnnnnnnnnnnnnnnnnnnnnnnnnnnnnnnnnnnnnnnnnnnnnnnnnnnnnnnnnnnnnnnnnnnnnnnnnnnnnnnnnnnnnnnnnnnnnnnnnnnnnnnnnnnnnnnnnnnnnnnnnnnnnnnnnnnnnnnnnnnnnnnnnnnnnnnnnnnnnnnnnnnnnnnnnnnnnnnnnnnnnnnnnnnnnnnnnnnnnnnnnnnnnnnnnnnnnnnnnnnnnnnnnnnnnnnnnnnnnnnnnnnnnnnnnnnnnnnnnnnnnnnnnnnnnnnnnnnnnnnnnnnnnnnnnnnnnnnnnnnnnnnnnnnnnnnnnnnnnnnnnnnnnnnnnnnnnnnnnnnnnnnnnnnnnnnnnnnnnnnnnnnnnnnnnnnnnnnnnnnnnnnnnnnnnnnnnnnnnnnnnnnnnnnnnnnnnnnnnnnnnnnnnnnnnnnnnnnnnnnnnnnnnnnnnnnnnnnnnnnnnnnnnnnnnnnnnnnnnnnnnnnnnnnnnnnnnnnnnnnnnnnnnnnnnnnnnnnnnnnnnnnnnnnnnnnnnnnnnnnnnnnnnnnnnnnnnnnnnnnnnnnnnnnnnnnnnnnnnnnnnnnnnnnnnnnnnnnnnnnnnnnnnnnnnnnnnnnnnnnnnnnnnnnnnnnnnnnnnnnnnnnnnnnnnnnnnnnnnnnnnnnnnnnnnnnnnnnnnnnnnnnnnnnnnnnnnnnnnnnnnnnnnnnnnnnnnnnnnnnnnnnnnnnnnnnnnnnnnnnnnnnnnnnnnnnnnnnnnnnnnnnnnnnnnnnnnnnnnnnnnnnnnnnnnnnnnnnnnnnnnnnnnnnnnnnnnnnnnnnnnnnnnnnnnnnnnnnnnnnnnnnnnnnnnnnnnnnnnnnnnnnnnnnnnnnnnnnnnnnnnnnnnnnnnnnnnnnnnnnnnnnnnnnnnnnnnnnnnnnnnnnnnnnnnnnnnnnnnnnnnnnnnnnnnnnnnnnnnnnnnnnnnnnnnnnnnnnnnnnnnnnnnnnnnnnnnnnnnnnnnnnnnnnnnnnnnnnnnnnnnnnnnnnnnnnnnnnnnnnnnnnnnnnnnnnnnnnnnnnnnnnnnnnnnnnnnnnnnnnnnnnnnnnnnnnnnnnnnnnnnnnnnnnnnnnnnnnnnnnnnnnnnnnnnnnnnnnnnnnnnnnnnnnnnnnnnnnnnnnnnnnnnnnnnnnnnnnnnnnnnnnnnnnnnnnnnnnnnnnnnnnnnnnnnnnnnnnnnnnnnnnnnnnnnnnnnnnnnnnnnnnnnnnnnnnnnnnnnnnnnnnnnnnnnnnnnnnnnnnnnnnnnnnnnnnnnnnnnnnnnnnnnnnnnnnnnnnnnnnnnnnnnnnnnnnnnnnnnnnnnnnnnnnnnnnnnnnnnnnnnnnnnnnnnnnnnnnnnnnnnnnnnnnnnnnnnnnnnnnnnnnnnnnnnnnnnnnnnnnnnnnnnnnnnnnnnnnnnnnnnnnnnnnnnnnnnnnnnnnnnnnnnnnnnnnnnnnnnnnnnnnnnnnnnnnnnnnnnnnnnnnnnnnnnnnnnnnnnnnnnnnnnnnnnnnnnnnnnnnnnnnnnnnnnnnnnnnnnnnnnnnnnnnnnnnnnnnnnnnnnnnnnnnnnnnnnnnnnnnnnnnnnnnnnnnnnnnnnnnnnnnnnnnnnnnnnnnnnnnnnnnnnnnnnnnnnnnnnnnnnnnnnnnnnnnnnnnnnnnnnnnnnnnnnnnnnnnnnnnnnnnnnnnnnnnnnnnnnnnnnnnnnnnnnnnnnnnnnnnnnnnnnnnnnnnnnnnnnnnnnnnnnnnnnnnnnnnnnnnnnnnnnnnnnnnnnnnnnnnnnnnnnnnnnnnnnnnnnnnnnnnnnnnnnnnnnnnnnnnnnnnnnnnnnnnnnnnnnnnnnnnnnnnnnnnnnnnnnnnnnnnnnnnnnnnnnnnnnnnnnnnnnnnnnnnnnnnnnnnnnnnnnnnnnnnnnnnnnnnnnnnnnnnnnnnnnnnnnnnnnnnnnnnnnnnnnnnnnnnnnnnnnnnnnnnnnnnnnnnnnnnnnnnnnnnnnnnnnnnnnnnnnnnnnnnnnnnnnnnnnnnnnnnnnnnnnnnnnnnnnnnnnnnnnnnnnnnnnnnnnnnnnnnnnnnnnnnnnnnnnnnnnnnnnnnnnnnnnnnnnnnnnnnnnnnnnnnnnnnnnnnnnnnnnnnnnnnnnnnnnnnnnnnnnnnnnnnnnnnnnnnnnnnnnnnnnnnnnnnnnnnnnnnnnnnnnnnnnnnnnnnnnnnnnnnnnnnnnnnnnnnnnnnnnnnnnnnnnnnnnnnnnnnnnnnnnnnnnnnnnnnnnnnnnnnnnnnnnnnnnnnnnnnnnnnnnnnnnnnnnnnnnnnnnnnnnnnnnnnnnnnnnnnnnnnnnnnnnnnnnnnnnnnnnnnnnnnnnnnnnnnnnnnnnnnnnnnnnnnnnnnnnnnnnnnnnnnnnnnnnnnnnnnnnnnnnnnnnnnnnnnnnnnnnnnnnnnnnnnnnnnnnnnnnnnnnnnnnnnnnnnnnnnnnnnnnnnnnnnnnnnnnnnnnnnnnnnnnnnnnnnnnnnnnnnnnnnnnnnnnnnnnnnnnnnnnnnnnnnnnnnnnnnnnnnnnnnnnnnnnnnnnnnnnnnnnnnnnnnnnnnnnnnnnnnnnnnnnnnnnnnnnnnnnnnnnnnnnnnnnnnnnnnnnnnnnnnnnnnnnnnnnnnnnnnnnnnnnnnnnnnnnnnnnnnnnnnnnnnnnnnnnnnnnnnnnnnnnnnnnnnnnnnnnnnnnnnnnnnnnnnnnnnnnnnnnnnnnnnnnnnnnnnnnnnnnnnnnnnnnnnnnnnnnnnnnnnnnnnnnnnnnnnnnnnnnnnnnnnnnnnnnnnnnnnnnnnnnnnnnnnnnnnnnnnnnnnnnnnnnnnnnnnnnnnnnnnnnnnnnnnnnnnnnnnnnnnnnnnnnnnnnnnnnnnnnnnnnnnnnnnnnnnnnnnnnnnnnnnnnnnnnnnnnnnnnnnnnnnnnnnnnnnnnnnnnnnnnnnnnnnnnnnnnnnnnnnnnnnnnnnnnnnnnnnnnnnnnnnnnnnnnnnnnnnnnnnnnnnnnnnnnnnnnnnnnnnnnnnnnnnnnnnnnnnnnnnnnnnnnnnnnnnnnnnnnnnnnnnnnnnnnnnnnnnnnnnnnnnnnnnnnnnnnnnnnnnnnnnnnnnnnnnnnnnnnnnnnnnnnnnnnnnnnnnnnnnnnnnnnnnnnnnnnnnnnnnnnnnnnnnnnnnnnnnnnnnnnnnnnnnnnnnnnnnnnnnnnnnnnnnnnnnnnnnnnnnnnnnnnnnnnnnnnnnnnnnnnnnnnnnnnnnnnnnnnnnnnnnnnnnnnnnnnnnnnnnnnnnnnnnnnnnnnnnnnnnnnnnnnnnnnnnnnnnnnnnnnnnnnnnnnnnnnnnnnnnnnnnnnnnnnnnnnnnnnnnnnnnnnnnnnnnnnnnnnnnnnnnnnnnnnnnnnnnnnnnnnnnnnnnnnnnnnnnnnnnnnnnnnnnnnnnnnnnnnnnnnnnnnnnnnnnnnnnnnnnnnnnnnnnnnnnnnnnnnnnnnnnnnnnnnnnnnnnnnnnnnnnnnnnnnnnnnnnnnnnnnnnnnnnnnnnnnnnnnnnnnnnnnnnnnnnnnnnnnnnnnnnnnnnnnnnnnnnnnnnnnnnnnnnnnnnnnnnnnnnnnnnnnnnnnnnnnnnnnnnnnnnnnnnnnnnnnnnnnnnnnnnnnnnnnnnnnnnnnnnnnnnnnnnnnnnnnnnnnnnnnnnnnnnnnnnnnnnnnnnnnnnnnnnnnnnnnnnnnnnnnnnnnnnnnnnnnnnnnnnnnnnnnnnnnnnnnnnnnnnnnnnnnnnnnnnnnnnnnnnnnnnnnnnnnnnnnnnnnnnnnnnnnnnnnnnnnnnnnnnnnnnnnnnnnnnnnnnnnnnnnnnnnnnnnnnnnnnnnnnnnnnnnnnnnnnnnnnnnnnnnnnnnnnnnnnnnnnnnnnnnnnnnnnnnnnnnnnnnnnnnnnnnnnnnnnnnnnnnnnnnnnnnnnnnnnnnnnnnnnnnnnnnnnnnnnnnnnnnnnnnnnnnnnnnnnnnnnnnnnnnnnnnnnnnnnnnnnnnnnnnnnnnnnnnnnnnnnnnnnnnnnnnnnnnnnnnnnnnnnnnnnnnnnnnnnnnnnnnnnnnnnnnnnnnnnnnnnnnnnnnnnnnnnnnnnnnnnnnnnnnnnnnnnnnnnnnnnnnnnnnnnnnnnnnnnnnnnnnnnnnnnnnnnnnnnnnnnnnnnnnnnnnnnnnnnnnnnnnnnnnnnnnnnnnnnnnnnnnnnnnnnnnnnnnnnnnnnnnnnnnnnnnnnnnnnnnnnnnnnnnnnnnnnnnnnnnnnnnnnnnnnnnnnnnnnnnnnnnnnnnnnnnnnnnnnnnnnnnnnnnnnnnnnnnnnnnnnnnnnnnnnnnnnnnnnnnnnnnnnnnnnnnnnnnnnnnnnnnnnnnnnnnnnnnnnnnnnnnnnnnnnnnnnnnnnnnnnnnnnnnnnnnnnnnnnnnnnnnnnnnnnnnnnnnnnnnnnnnnnnnnnnnnnnnnnnnnnnnnnnnnnnnnnnnnnnnnnnnnnnnnnnnnnnnnnnnnnnnnnnnnnnnnnnnnnnnnnnnnnnnnnnnnnnnnnnnnnnnnnnnnnnnnnnnnnnnnnnnnnnnnnnnnnnnnnnnnnnnnnnnnnnnnnnnnnnnnnnnnnnnnnnnnnnnnnnnnnnnnnnnnnnnnnnnnnnnnnnnnnnnnnnnnnnnnnnnnnnnnnnnnnnnnnnnnnnnnnnnnnnnnnnnnnnnnnnnnnnnnnnnnnnnnnnnnnnnnnnnnnnnnnnnnnnnnnnnnnnnnnnnnnnnnnnnnnnnnnnnnnnnnnnnnnnnnnnnnnnnnnnnnnnnnnnnnnnnnnnnnnnnnnnnnnnnnnnnnnnnnnnnnnnnnnnnnnnnnnnnnnnnnnnnnnnnnnnnnnnnnnnnnnnnnnnnnnnnnnnnnnnnnnnnnnnnnnnnnnnnnnnnnnnnnnnnnnnnnnnnnnnnnnnnnnnnnnnnnnnnnnnnnnnnnnnnnnnnnnnnnnnnnnnnnnnnnnnnnnnnnnnnnnnnnnnnnnnnnnnnnnnnnnnnnnnnnnnnnnnnnnnnnnnnnnnnnnnnnnnnnnnnnnnnnnnnnnnnnnnnnnnnnnnnnnnnnnnnnnnnnnnnnnnnnnnnnnnnnnnnnnnnnnnnnnnnnnnnnnnnnnnnnnnnnnnnnnnnnnnnnnnnnnnnnnnnnnnnnnnnnnnnnnnnnnnnnnnnnnnnnnnnnnnnnnnnnnnnnnnnnnnnnnnnnnnnnnnnnnnnnnnnnnnnnnnnnnnnnnnnnnnnnnnnnnnnnnnnnnnnnnnnnnnnnnnnnnnnnnnnnnnnnnnnnnnnnnnnnnnnnnnnnnnnnnnnnnnnnnnnnnnnnnnnnnnnnnnnnnnnnnnnnnnnnnnnnnnnnnnnnnnnnnnnnnnnnnnnnnnnnnnnnnnnnnnnnnnnnnnnnnnnnnnnnnnnnnnnnnnnnnnnnnnnnnnnnnnnnnnnnnnnnnnnnnnnnnnnnnnnnnnnnnnnnnnnnnnnnnnnnnnnnnnnnnnnnnnnnnnnnnnnnnnnnnnnnnnnnnnnnnnnnnnnnnnnnnnnnnnnnnnnnnnnnnnnnnnnnnnnnnnnnnnnnnnnnnnnnnnnnnnnnnnnnnnnnnnnnnnnnnnnnnnnnnnnnnnnnnnnnnnnnnnnnnnnnnnnnnnnnnnnnnnnnnnnnnnnnnnnnnnnnnnnnnnnnnnnnnnnnnnnnnnnnnnnnnnnnnnnnnnnnnnnnnnnnnnnnnnnnnnnnnnnnnnnnnnnnnnnnnnnnnnnnnnnnnnnnnnnnnnnnnnnnnnnnnnnnnnnnnnnnnnnnnnnnnnnnnnnnnnnnnnnnnnnnnnnnnnnnnnnnnnnnnnnnnnnnnnnnnnnnnnnnnnnnnnnnnnnnnnnnnnnnnnnnnnnnnnnnnnnnnnnnnnnnnnnnnnnnnnnnnnnnnnnnnnnnnnnnnnnnnnnnnnnnnnnnnnnnnnnnnnnnnnnnnnnnnnnnnnnnnnnnnnnnnnnnnnnnnnnnnnnnnnnnnnnnnnnnnnnnnnnnnnnnnnnnnnnnnnnnnnnnnnnnnnnnnnnnnnnnnnnnnnnnnnnnnnnnnnnnnnnnnnnnnnnnnnnnnnnnnnnnnnnnnnnnnnnnnnnnnnnnnnnnnnnnnnnnnnnnnnnnnnnnnnnnnnnnnnnnnnnnnnnnnnnnnnnnnnnnnnnnnnnnnnnnnnnnnnnnnnnnnnnnnnnnnnnnnnnnnnnnnnnnnnnnnnnnnnnnnnnnnnnnnnnnnnnnnnnnnnnnnnnnnnnnnnnnnnnnnnnnnnnnnnnnnnnnnnnnnnnnnnnnnnnnnnnnnnnnnnnnnnnnnnnnnnnnnnnnnnnnnnnnnnnnnnnnnnnnnnnnnnnnnnnnnnnnnnnnnnnnnnnnnnnnnnnnnnnnnnnnnnnnnnnnnnnnnnnnnnnnnnnnnnnnnnnnnnnnnnnnnnnnnnnnnnnnnnnnnnnnnnnnnnnnnnnnnnnnnnnnnnnnnnnnnnnnnnnnnnnnnnnnnnnnnnnnnnnnnnnnnnnnnnnnnnnnnnnnnnnnnnnnnnnnnnnnnnnnnnnnnnnnnnnnnnnnnnnnnnnnnnnnnnnnnnnnnnnnnnnnnnnnnnnnnnnnnnnnnnnnnnnnnnnnnnnnnnnnnnnnnnnnnnnnnnnnnnnnnnnnnnnnnnnnnnnnnnnnnnnnnnnnnnnnnnnnnnnnnnnnnnnnnnnnnnnnnnnnnnnnnnnnnnnnnnnnnnnnnnnnnnnnnnnnnnnnnnnnnnnnnnnnnnnnnnnnnnnnnnnnnnnnnnnnnnnnnnnnnnnnnnnnnnnnnnnnnnnnnnnnnnnnnnnnnnnnnnnnnnnnnnnnnnnnnnnnnnnnnnnnnnnnnnnnnnnnnnnnnnnnnnnnnnnnnnnnnnnnnnnnnnnnnnnnnnnnnnnnnnnnnnnnnnnnnnnnnnnnnnnnnnnnnnnnnnnnnnnnnnnnnnnnnnnnnnnnnnnnnnnnnnnnnnnnnnnnnnnnnnnnnnnnnnnnnnnnnnnnnnnnnnnnnnnnnnnnnnnnnnnnnnnnnnnnnnnnnnnnnnnnnnnnnnnnnnnnnnnnnnnnnnnnnnnnnnnnnnnnnnnnnnnnnnnnnnnnnnnnnnnnnnnnnnnnnnnnnnnnnnnnnnnnnnnnnnnnnnnnnnnnnnnnnnnnnnnnnnnnnnnnnnnnnnnnnnnnnnnnnnnnnnnnnnnnnnnnnnnnnnnnnnnnnnnnnnnnnnnnnnnnnnnnnnnnnnnnnnnnnnnnnnnnnnnnnnnnnnnnnnnnnnnnnnnnnnnnnnnnnnnnnnnnnnnnnnnnnnnnnnnnnnnnnnnnnnnnnnnnnnnnnnnnnnnnnnnnnnnnnnnnnnnnnnnnnnnnnnnnnnnnnnnnnnnnnnnnnnnnnnnnnnnnnnnnnnnnnnnnnnnnnnnnnnnnnnnnnnnnnnnnnnnnnnnnnnnnnnnnnnnnnnnnnnnnnnnnnnnnnnnnnnnnnnnnnnnnnnnnnnnnnnnnnnnnnnnnnnnnnnnnnnnnnnnnnnnnnnnnnnnnnnnnnnnnnnnnnnnnnnnnnnnnnnnnnnnnnnnnnnnnnnnnnnnnnnnnnnnnnnnnnnnnnnnnnnnnnnnnnnnnnnnnnnnnnnnnnnnnnnnnnnnnnnnnnnnnnnnnnnnnnnnnnnnnnnnnnnnnnnnnnnnnnnnnnnnnnnnnnnnnnnnnnnnnnnnnnnnnnnnnnnnnnnnnnnnnnnnnnnnnnnnnnnnnnnnnnnnnnnnnnnnnnnnnnnnnnnnnnnnnnnnnnnnnnnnnnnnnnnnnnnnnnnnnnnnnnnnnnnnnnnnnnnnnnnnnnnnnnnnnnnnnnnnnnnnnnnnnnnnnnnnnnnnnnnnnnnnnnnnnnnnnnnnnnnnnnnnnnnnnnnnnnnnnnnnnnnnnnnnnnnnnnnnnnnnnnnnnnnnnnnnnnnnnnnnnnnnnnnnnnnnnnnnnnnnnnnnnnnnnnnnnnnnnnnnnnnnnnnnnnnnnnnnnnnnnnnnnnnnnnnnnnnnnnnnnnnnnnnnnnnnnnnnnnnnnnnnnnnnnnnnnnnnnnnnnnnnnnnnnnnnnnnnnnnnnnnnnnnnnnnnnnnnnnnnnnnnnnnnnnnnnnnnnnnnnnnnnnnnnnnnnnnnnnnnnnnnnnnnnnnnnnnnnnnnnnnnnnnnnnnnnnnnnnnnnnnnnnnnnnnnnnnnnnnnnnnnnnnnnnnnnnnnnnnnnnnnnnnnnnnnnnnnnnnnnnnnnnnnnnnnnnnnnnnnnnnnnnnnnnnnnnnnnnnnnnnnnnnnnnnnnnnnnnnnnnnnnnnnnnnnnnnnnnnnnnnnnnnnnnnnnnnnnnnnnnnnnnnnnnnnnnnnnnnnnnnnnnnnnnnnnnnnnnnnnnnnnnnnnnnnnnnnnnnnnnnnnnnnnnnnnnnnnnnnnnnnnnnnnnnnnnnnnnnnnnnnnnnnnnnnnnnnnnnnnnnnnnnnnnnnnnnnnnnnnnnnnnnnnnnnnnnnnnnnnnnnnnnnnnnnnnnnnnnnnnnnnnnnnnnnnnnnnnnnnnnnnnnnnnnnnnnnnnnnnnnnnnnnnnnnnnnnnnnnnnnnnnnnnnnnnnnnnnnnnnnnnnnnnnnnnnnnnnnnnnnnnnnnnnnnnnnnnnnnnnnnnnnnnnnnnnnnnnnnnnnnnnnnnnnnnnnnnnnnnnnnnnnnnnnnnnnnnnnnnnnnnnnnnnnnnnnnnnnnnnnnnnnnnnnnnnnnnnnnnnnnnnnnnnnnnnnnnnnnnnnnnnnnnnnnnnnnnnnnnnnnnnnnnnnnnnnnnnnnnnnnnnnnnnnnnnnnnnnnnnnnnnnnnnnnnnnnnnnnnnnnnnnnnnnnnnnnnnnnnnnnnnnnnnnnnnnnnnnnnnnnnnnnnnnnnnnnnnnnnnnnnnnnnnnnnnnnnnnnnnnnnnnnnnnnnnnnnnnnnnnnnnnnnnnnnnnnnnnnnnnnnnnnnnnnnnnnnnnnnnnnnnnnnnnnnnnnnnnnnnnnnnnnnnnnnnnnnnnnnnnnnnnnnnnnnnnnnnnnnnnnnnnnnnnnnnnnnnnnnnnnnnnnnnnnnnnnnnnnnnnnnnnnnnnnnnnnnnnnnnnnnnnnnnnnnnnnnnnnnnnnnnnnnnnnnnnnnnnnnnnnnnnnnnnnnnnnnnnnnnnnnnnnnnnnnnnnnnnnnnnnnnnnnnnnnnnnnnnnnnnnnnnnnnnnnnnnnnnnnnnnnnnnnnnnnnnnnnnnnnnnnnnnnnnnnnnnnnnnnnnnnnnnnnnnnnnnnnnnnnnnnnnnnnnnnnnnnnnnnnnnnnnnnnnnnnnnnnnnnnnnnnnnnnnnnnnnnnnnnnnnnnnnnnnnnnnnnnnnnnnnnnnnnnnnnnnnnnnnnnnnnnnnnnnnnnnnnnnnnnnnnnnnnnnnnnnnnnnnnnnnnnnnnnnnnnnnnnnnnnnnnnnnnnnnnnnnnnnnnnnnnnnnnnnnnnnnnnnnnnnnnnnnnnnnnnnnnnnnnnnnnnnnnnnnnnnnnnnnnnnnnnnnnnnnnnnnnnnnnnnnnnnnnnnnnnnnnnnnnnnnnnnnnnnnnnnnnnnnnnnnnnnnnnnnnnnnnnnnnnnnnnnnnnnnnnnnnnnnnnnnnnnnnnnnnnnnnnnnnnnnnnnnnnnnnnnnnnnnnnnnnnnnnnnnnnnnnnnnnnnnnnnnnnnnnnnnnnnnnnnnnnnnnnnnnnnnnnnnnnnnnnnnnnnnnnnnnnnnnnnnnnnnnnnnnnnnnnnnnnnnnnnnnnnnnnnnnnnnnnnnnnnnnnnnnnnnnnnnnnnnnnnnnnnnnnnnnnnnnnnnnnnnnnnnnnnnnnnnnnnnnnnnnnnnnnnnnnnnnnnnnnnnnnnnnnnnnnnnnnnnnnnnnnnnnnnnnnnnnnnnnnnnnnnnnnnnnnnnnnnnnnnnnnnnnnnnnnnnnnnnnnnnnnnnnnnnnnnnnnnnnnnnnnnnnnnnnnnnnnnnnnnnnnnnnnnnnnnnnnnnnnnnnnnnnnnnnnnnnnnnnnnnnnnnnnnnnnnnnnnnnnnnnnnnnnnnnnnnnnnnnnnnnnnnnnnnnnnnnnnnnnnnnnnnnnnnnnnnnnnnnnnnnnnnnnnnnnnnnnnnnnnnnnnnnnnnnnnnnnnnnnnnnnnnnnnnnnnnnnnnnnnnnnnnnnnnnnnnnnnnnnnnnnnnnnnnnnnnnnnnnnnnnnnnnnnnnnnnnnnnnnnnnnnnnnnnnnnnnnnnnnnnnnnnnnnnnnnnnnnnnnnnnnnnnnnnnnnnnnnnnnnnnnnnnnnnnnnnnnnnnnnnnnnnnnnnnnnnnnnnnnnnnnnnnnnnnnnnnnnnnnnnnnnnnnnnnnnnnnnnnnnnnnnnnnnnnnnnnnnnnnnnnnnnnnnnnnnnnnnnnnnnnnnnnnnnnnnnnnnnnnnnnnnnnnnnnnnnnnnnnnnnnnnnnnnnnnnnnnnnnnnnnnnnnnnnnnnnnnnnnnnnnnnnnnnnnnnnnnnnnnnnnnnnnnnnnnnnnnnnnnnnnnnnnnnnnnnnnnnnnnnnnnnnnnnnnnnnnnnnnnnnnnnnnnnnnnnnnnnnnnnnnnnnnnnnnnnnnnnnnnnnnnnnnnnnnnnnnnnnnnnnnnnnnnnnnnnnnnnnnnnnnnnnnnnnnnnnnnnnnnnnnnnnnnnnnnnnnnnnnnnnnnnnnnnnnnnnnnnnnnnnnnnnnnnnnnnnnnnnnnnnnnnnnnnnnnnnnnnnnnnnnnnnnnnnnnnnnnnnnnnnnnnnnnnnnnnnnnnnnnnnnnnnnnnnnnnnnnnnnnnnnnnnnnnnnnnnnnnnnnnnnnnnnnnnnnnnnnnnnnnnnnnnnnnnnnnnnnnnnnnnnnnnnnnnnnnnnnnnnnnnnnnnnnnnnnnnnnnnnnnnnnnnnnnnnnnnnnnnnnnnnnnnnnnnnnnnnnnnnnnnnnnnnnnnnnnnnnnnnnnnnnnnnnnnnnnnnnnnnnnnnnnnnnnnnnnnnnnnnnnnnnnnnnnnnnnnnnnnnnnnnnnnnnnnnnnnnnnnnnnnnnnnnnnnnnnnnnnnnnnnnnnnnnnnnnnnnnnnnnnnnnnnnnnnnnnnnnnnnnnnnnnnnnnnnnnnnnnnnnnnnnnnnnnnnnnnnnnnnnnnnnnnnnnnnnnnnnnnnnnnnnnnnnnnnnnnnnnnnnnnnnnnnnnnnnnnnnnnnnnnnnnnnnnnnnnnnnnnnnnnnnnnnnnnnnnnnnnnnnnnnnnnnnnnnnnnnnnnnnnnnnnnnnnnnnnnnnnnnnnnnnnnnnnnnnnnnnnnnnnnnnnnnnnnnnnnnnnnnnnnnnnnnnnnnnnnnnnnnnnnnnnnnnnnnnnnnnnnnnnnnnnnnnnnnnnnnnnnnnnnnnnnnnnnnnnnnnnnnnnnnnnnnnnnnnnnnnnnnnnnnnnnnnnnnnnnnnnnnnnnnnnnnnnnnnnnnnnnnnnnnnnnnnnnnnnnnnnnnnnnnnnnnnnnnnnnnnnnnnnnnnnnnnnnnnnnnnnnnnnnnnnnnnnnnnnnnnnnnnnnnnnnnnnnnnnnnnnnnnnnnnnnnnnnnnnnnnnnnnnnnnnnnnnnnnnnnnnnnnnnnnnnnnnnnnnnnnnnnnnnnnnnnnnnnnnnnnnnnnnnnnnnnnnnnnnnnnnnnnnnnnnnnnnnnnnnnnnnnnnnnnnnnnnnnnnnnnnnnnnnnnnnnnnnnnnnnnnnnnnnnnnnnnnnnnnnnnnnnnnnnnnnnnnnnnnnnnnnnnnnnnnnnnnnnnnnnnnnnnnnnnnnnnnnnnnnnnnnnnnnnnnnnnnnnnnnnnnnnnnnnnnnnnnnnnnnnnnnnnnnnnnnnnnnnnnnnnnnnnnnnnnnnnnnnnnnnnnnnnnnnnnnnnnnnnnnnnnnnnnnnnnnnnnnnnnnnnnnnnnnnnnnnnnnnnnnnnnnnnnnnnnnnnnnnnnnnnnnnnnnnnnnnnnnnnnnnnnnnnnnnnnnnnnnnnnnnnnnnnnnnnnnnnnnnnnnnnnnnnnnnnnnnnnnnnnnnnnnnnnnnnnnnnnnnnnnnnnnnnnnnnnnnnnnnnnnnnnnnnnnnnnnnnnnnnnnnnnnnnnnnnnnnnnnnnnnnnnnnnnnnnnnnnnnnnnnnnnnnnnnnnnnnnnnnnnnnnnnnnnnnnnnnnnnnnnnnnnnnnnnnnnnnnnnnnnnnnnnnnnnnnnnnnnnnnnnnnnnnnnnnnnnnnnnnnnnnnnnnnnnnnnnnnnnnnnnnnnnnnnnnnnnnnnnnnnnnnnnnnnnnnnnnnnnnnnnnnnnnnnnnnnnnnnnnnnnnnnnnnnnnnnnnnnnnnnnnnnnnnnnnnnnnnnnnnnnnnnnnnnnnnnnnnnnnnnnnnnnnnnnnnnnnnnnnnnnnnnnnnnnnnnnnnnnnnnnnnnnnnnnnnnnnnnnnnnnnnnnnnnnnnnnnnnnnnnnnnnnnnnnnnnnnnnnnnnnnnnnnnnnnnnnnnnnnnnnnnnnnnnnnnnnnnnnnnnnnnnnnnnnnnnnnnnnnnnnnnnnnnnnnnnnnnnnnnnnnnnnnnnnnnnnnnnnnnnnnnnnnnnnnnnnnnnnnnnnnnnnnnnnnnnnnnnnnnnnnnnnnnnnnnnnnnnnnnnnnnnnnnnnnnnnnnnnnnnnnnnnnnnnnnnnnnnnnnnnnnnnnnnnnnnnnnnnnnnnnnnnnnnnnnnnnnnnnnnnnnnnnnnnnnnnnnnnnnnnnnnnnnnnnnnnnnnnnnnnnnnnnnnnnnnnnnnnnnnnnnnnnnnnnnnnnnnnnnnnnnnnnnnnnnnnnnnnnnnnnnnnnnnnnnnnnnnnnnnnnnnnnnnnnnnnnnnnnnnnnnnnnnnnnnnnnnnnnnnnnnnnnnnnnnnnnnnnnnnnnnnnnnnnnnnnnnnnnnnnnnnnnnnnnnnnnnnnnnnnnnnnnnnnnnnnnnnnnnnnnnnnnnnnnnnnnnnnnnnnnnnnnnnnnnnnnnnnnnnnnnnnnnnnnnnnnnnnnnnnnnnnnnnnnnnnnnnnnnnnnnnnnnnnnnnnnnnnnnnnnnnnnnnnnnnnnnnnnnnnnnnnnnnnnnnnnnnnnnnnnnnnnnnnnnnnnnnnnnnnnnnnnnnnnnnnnnnnnnnnnnnnnnnnnnnnnnnnnnnnnnnnnnnnnnnnnnnnnnnnnnnnnnnnnnnnnnnnnnnnnnnnnnnnnnnnnnnnnnnnnnnnnnnnnnnnnnnnnnnnnnnnnnnnnnnnnnnnnnnnnnnnnnnnnnnnnnnnnnnnnnnnnnnnnnnnnnnnnnnnnnnnnnnnnnnnnnnnnnnnnnnnnnnnnnnnnnnnnnnnnnnnnnnnnnnnnnnnnnnnnnnnnnnnnnnnnnnnnnnnnnnnnnnnnnnnnnnnnnnnnnnnnnnnnnnnnnnnnnnnnnnnnnnnnnnnnnnnnnnnnnnnnnnnnnnnnnnnnnnnnnnnnnnnnnnnnnnnnnnnnnnnnnnnnnnnnnnnnnnnnnnnnnnnnnnnnnnnnnnnnnnnnnnnnnnnnnnnnnnnnnnnnnnnnnnnnnnnnnnnnnnnnnnnnnnnnnnnnnnnnnnnnnnnnnnnnnnnnnnnnnnnnnnnnnnnnnnnnnnnnnnnnnnnnnnnnnnnnnnnnnnnnnnnnnnnnnnnnnnnnnnnnnnnnnnnnnnnnnnnnnnnnnnnnnnnnnnnnnnnnnnnnnnnnnnnnnnnnnnnnnnnnnnnnnnnnnnnnnnnnnnnnnnnnnnnnnnnnnnnnnnnnnnnnnnnnnnnnnnnnnnnnnnnnnnnnnnnnnnnnnnnnnnnnnnnnnnnnnnnnnnnnnnnnnnnnnnnnnnnnnnnnnnnnnnnnnnnnnnnnnnnnnnnnnnnnnnnnnnnnnnnnnnnnnnnnnnnnnnnnnnnnnnnnnnnnnnnnnnnnnnnnnnnnnnnnnnnnnnnnnnnnnnnnnnnnnnnnnnnnnnnnnnnnnnnnnnnnnnnnnnnnnnnnnnnnnnnnnnnnnnnnnnnnnnnnnnnnnnnnnnnnnnnnnnnnnnnnnnnnnnnnnnnnnnnnnnnnnnnnnnnnnnnnnnnnnnnnnnnnnnnnnnnnnnnnnnnnnnnnnnnnnnnnnnnnnnnnnnnnnnnnnnnnnnnnnnnnnnnnnnnnnnnnnnnnnnnnnnnnnnnnnnnnnnnnnnnnnnnnnnnnnnnnnnnnnnnnnnnnnnnnnnnnnnnnnnnnnnnnnnnnnnnnnnnnnnnnnnnnnnnnnnnnnnnnnnnnnnnnnnnnnnnnnnnnnnnnnnnnnnnnnnnnnnnnnnnnnnnnnnnnnnnnnnnnnnnnnnnnnnnnnnnnnnnnnnnnnnnnnnnnnnnnnnnnnnnnnnnnnnnnnnnnnnnnnnnnnnnnnnnnnnnnnnnnnnnnnnnnnnnnnnnnnnnnnnnnnnnnnnnnnnnnnnnnnnnnnnnnnnnnnnnnnnnnnnnnnnnnnnnnnnnnnnnnnnnnnnnnnnnnnnnnnnnnnnnnnnnnnnnnnnnnnnnnnnnnnnnnnnnnnnnnnnnnnnnnnnnnnnnnnnnnnnnnnnnnnnnnnnnnnnnnnnnnnnnnnnnnnnnnnnnnnnnnnnnnnnnnnnnnnnnnnnnnnnnnnnnnnnnnnnnnnnnnnnnnnnnnnnnnnnnnnnnnnnnnnnnnnnnnnnnnnnnnnnnnnnnnnnnnnnnnnnnnnnnnnnnnnnnnnnnnnnnnnnnnnnnnnnnnnnnnnnnnnnnnnnnnnnnnnnnnnnnnnnnnnnnnnnnnnnnnnnnnnnnnnnnnnnnnnnnnnnnnnnnnnnnnnnnnnnnnnnnnnnnnnnnnnnnnnnnnnnnnnnnnnnnnnnnnnnnnnnnnnnnnnnnnnnnnnnnnnnnnnnnnnnnnnnnnnnnnnnnnnnnnnnnnnnnnnnnnnnnnnnnnnnnnnnnnnnnnnnnnnnnnnnnnnnnnnnnnnnnnnnnnnnnnnnnnnnnnnnnnnnnnnnnnnnnnnnnnnnnnnnnnnnnnnnnnnnnnnnnnnnnnnnnnnnnnnnnnnnnnnnnnnnnnnnnnnnnnnnnnnnnnnnnnnnnnnnnnnnnnnnnnnnnnnnnnnnnnnnnnnnnnnnnnnnnnnnnnnnnnnnnnnnnnnnnnnnnnnnnnnnnnnnnnnnnnnnnnnnnnnnnnnnnnnnnnnnnnnnnnnnnnnnnnnnnnnnnnnnnnnnnnnnnnnnnnnnnnnnnnnnnnnnnnnnnnnnnnnnnnnnnnnnnnnnnnnnnnnnnnnnnnnnnnnnnnnnnnnnnnnnnnnnnnnnnnnnnnnnnnnnnnnnnnnnnnnnnnnnnnnnnnnnnnnnnnnnnnnnnnnnnnnnnnnnnnnnnnnnnnnnnnnnnnnnnnnnnnnnnnnnnnnnnnnnnnnnnnnnnnnnnnnnnnnnnnnnnnnnnnnnnnnnnnnnnnnnnnnnnnnnnnnnnnnnnnnnnnnnnnnnnnnnnnnnnnnnnnnnnnnnnnnnnnnnnnnnnnnnnnnnnnnnnnnnnnnnnnnnnnnnnnnnnnnnnnnnnnnnnnnnnnnnnnnnnnnnnnnnnnnnnnnnnnnnnnnnnnnnnnnnnnnnnnnnnnnnnnnnnnnnnnnnnnnnnnnnnnnnnnnnnnnnnnnnnnnnnnnnnnnnnnnnnnnnnnnnnnnnnnnnnnnnnnnnnnnnnnnnnnnnnnnnnnnnnnnnnnnnnnnnnnnnnnnnnnnnnnnnnnnnnnnnnnnnnnnnnnnnnnnnnnnnnnnnnnnnnnnnnnnnnnnnnnnnnnnnnnnnnnnnnnnnnnnnnnnnnnnnnnnnnnnnnnnnnnnnnnnnnnnnnnnnnnnnnnnnnnnnnnnnnnnnnnnnnnnnnnnnnnnnnnnnnnnnnnnnnnnnnnnnnnnnnnnnnnnnnnnnnnnnnnnnnnnnnnnnnnnnnnnnnnnnnnnnnnnnnnnnnnnnnnnnnnnnnnnnnnnnnnnnnnnnnnnnnnnnnnnnnnnnnnnnnnnnnnnnnnnnnnnnnnnnnnnnnnnnnnnnnnnnnnnnnnnnnnnnnnnnnnnnnnnnnnnnnnnnnnnnnnnnnnnnnnnnnnnnnnnnnnnnnnnnnnnnnnnnnnnnnnnnnnnnnnnnnnnnnnnnnnnnnnnnnnnnnnnnnnnnnnnnnnnnnnnnnnnnnnnnnnnnnnnnnnnnnnnnnnnnnnnnnnnnnnnnnnnnnnnnnnnnnnnnnnnnnnnnnnnnnnnnnnnnnnnnnnnnnnnnnnnnnnnnnnnnnnnnnnnnnnnnnnnnnnnnnnnnnnnnnnnnnnnnnnnnnnnnnnnnnnnnnnnnnnnnnnnnnnnnnnnnnnnnnnnnnnnnnnnnnnnnnnnnnnnnnnnnnnnnnnnnnnnnnnnnnnnnnnnnnnnnnnnnnnnnnnnnnnnnnnnnnnnnnnnnnnnnnnnnnnnnnnnnnnnnnnnnnnnnnnnnnnnnnnnnnnnnnnnnnnnnnnnnnnnnnnnnnnnnnnnnnnnnnnnnnnnnnnnnnnnnnnnnnnnnnnnnnnnnnnnnnnnnnnnnnnnnnnnnnnnnnnnnnnnnnnnnnnnnnnnnnnnnnnnnnnnnnnnnnnnnnnnnnnnnnnnnnnnnnnnnnnnnnnnnnnnnnnnnnnnnnnnnnnnnnnnnnnnnnnnnnnnnnnnnnnnnnnnnnnnnnnnnnnnnnnnnnnnnnnnnnnnnnnnnnnnnnnnnnnnnnnnnnnnnnnnnnnnnnnnnnnnnnnnnnnnnnnnnnnnnnnnnnnnnnnnnnnnnnnnnnnnnnnnnnnnnnnnnnnnnnnnnnnnnnnnnnnnnnnnnnnnnnnnnnnnnnnnnnnnnnnnnnnnnnnnnnnnnnnnnnnnnnnnnnnnnnnnnnnnnnnnnnnnnnnnnnnnnnnnnnnnnnnnnnnnnnnnnnnnnnnnnnnnnnnnnnnnnnnnnnnnnnnnnnnnnnnnnnnnnnnnnnnnnnnnnnnnnnnnnnnnnnnnnnnnnnnnnnnnnnnnnnnnnnnnnnnnnnnnnnnnnnnnnnnnnnnnnnnnnnnnnnnnnnnnnnnnnnnnnnnnnnnnnnnnnnnnnnnnnnnnnnnnnnnnnnnnnnnnnnnnnnnnnnnnnnnnnnnnnnnnnnnnnnnnnnnnnnnnnnnnnnnnnnnnnnnnnnnnnnnnnnnnnnnnnnnnnnnnnnnnnnnnnnnnnnnnnnnnnnnnnnnnnnnnnnnnnnnnnnnnnnnnnnnnnnnnnnnnnnnnnnnnnnnnnnnnnnnnnnnnnnnnnnnnnnnnnnnnnnnnnnnnnnnnnnnnnnnnnnnnnnnnnnnnnnnnnnnnnnnnnnnnnnnnnnnnnnnnnnnnnnnnnnnnnnnnnnnnnnnnnnnnnnnnnnnnnnnnnnnnnnnnnnnnnnnnnnnnnnnnnnnnnnnnnnnnnnnnnnnnnnnnnnnnnnnnnnnnnnnnnnnnnnnnnnnnnnnnnnnnnnnnnnnnnnnnnnnnnnnnnnnnnnnnnnnnnnnnnnnnnnnnnnnnnnnnnnnnnnnnnnnnnnnnnnnnnnnnnnnnnnnnnnnnnnnnnnnnnnnnnnnnnnnnnnnnnnnnnnnnnnnnnnnnnnnnnnnnnnnnnnnnnnnnnnnnnnnnnnnnnnnnnnnnnnnnnnnnnnnnnnnnnnnnnnnnnnnnnnnnnnnnnnnnnnnnnnnnnnnnnnnnnnnnnnnnnnnnnnnnnnnnnnnnnnnnnnnnnnnnnnnnnnnnnnnnnnnnnnnnnnnnnnnnnnnnnnnnnnnnnnnnnnnnnnnnnnnnnnnnnnnnnnnnnnnnnnnnnnnnnnnnnnnnnnnnnnnnnnnnnnnnnnnnnnnnnnnnnnnnnnnnnnnnnnnnnnnnnnnnnnnnnnnnnnnnnnnnnnnnnnnnnnnnnnnnnnnnnnnnnnnnnnnnnnnnnnnnnnnnnnnnnnnnnnnnnnnnnnnnnnnnnnnnnnnnnnnnnnnnnnnnnnnnnnnnnnnnnnnnnnnnnnnnnnnnnnnnnnnnnnnnnnnnnnnnnnnnnnnnnnnnnnnnnnnnnnnnnnnnnnnnnnnnnnnnnnnnnnnnnnnnnnnnnnnnnnnnnnnnnnnnnnnnnnnnnnnnnnnnnnnnnnnnnnnnnnnnnnnnnnnnnnnnnnnnnnnnnnnnnnnnnnnnnnnnnnnnnnnnnnnnnnnnnnnnnnnnnnnnnnnnnnnnnnnnnnnnnnnnnnnnnnnnnnnnnnnnnnnnnnnnnnnnnnnnnnnnnnnnnnnnnnnnnnnnnnnnnnnnnnnnnnnnnnnnnnnnnnnnnnnnnnnnnnnnnnnnnnnnnnnnnnnnnnnnnnnnnnnnnnnnnnnnnnnnnnnnnnnnnnnnnnnnnnnnnnnnnnnnnnnnnnnnnnnnnnnnnnnnnnnnnnnnnnnnnnnnnnnnnnnnnnnnnnnnnnnnnnnnnnnnnnnnnnnnnnnnnnnnnnnnnnnnnnnnnnnnnnnnnnnnnnnnnnnnnnnnnnnnnnnnnnnnnnnnnnnnnnnnnnnnnnnnnnnnnnnnnnnnnnnnnnnnnnnnnnnnnnnnnnnnnnnnnnnnnnnnnnnnnnnnnnnnnnnnnnnnnnnnnnnnnnnnnnnnnnnnnnnnnnnnnnnnnnnnnnnnnnnnnnnnnnnnnnnnnnnnnnnnnnnnnnnnnnnnnnnnnnnnnnnnnnnnnnnnnnnnnnnnnnnnnnnnnnnnnnnnnnnnnnnnnnnnnnnnnnnnnnnnnnnnnnnnnnnnnnnnnnnnnnnnnnnnnnnnnnnnnnnnnnnnnnnnnnnnnnnnnnnnnnnnnnnnnnnnnnnnnnnnnnnnnnnnnnnnnnnnnnnnnnnnnnnnnnnnnnnnnnnnnnnnnnnnnnnnnnnnnnnnnnnnnnnnnnnnnnnnnnnnnnnnnnnnnnnnnnnnnnnnnnnnnnnnnnnnnnnnnnnnnnnnnnnnnnnnnnnnnnnnnnnnnnnnnnnnnnnnnnnnnnnnnnnnnnnnnnnnnnnnnnnnnnnnnnnnnnnnnnnnnnnnnnnnnnnnnnnnnnnnnnnnnnnnnnnnnnnnnnnnnnnnnnnnnnnnnnnnnnnnnnnnnnnnnnnnnnnnnnnnnnnnnnnnnnnnnnnnnnnnnnnnnnnnnnnnnnnnnnnnnnnnnnnnnnnnnnnnnnnnnnnnnnnnnnnnnnnnnnnnnnnnnnnnnnnnnnnnnnnnnnnnnnnnnnnnnnnnnnnnnnnnnnnnnnnnnnnnnnnnnnnnnnnnnnnnnnnnnnnnnnnnnnnnnnnnnnnnnnnnnnnnnnnnnnnnnnnnnnnnnnnnnnnnnnnnnnnnnnnnnnnnnnnnnnnnnnnnnnnnnnnnnnnnnnnnnnnnnnnnnnnnnnnnnnnnnnnnnnnnnnnnnnnnnnnnnnnnnnnnnnnnnnnnnnnnnnnnnnnnnnnnnnnnnnnnnnnnnnnnnnnnnnnnnnnnnnnnnnnnnnnnnnnnnnnnnnnnnnnnnnnnnnnnnnnnnnnnnnnnnnnnnnnnnnnnnnnnnnnnnnnnnnnnnnnnnnnnnnnnnnnnnnnnnnnnnnnnnnnnnnnnnnnnnnnnnnnnnnnnnnnnnnnnnnnnnnnnnnnnnnnnnnnnnnnnnnnnnnnnnnnnnnnnnnnnnnnnnnnnnnnnnnnnnnnnnnnnnnnnnnnnnnnnnnnnnnnnnnnnnnnnnnnnnnnnnnnnnnnnnnnnnnnnnnnnnnnnnnnnnnnnnnnnnnnnnnnnnnnnnnnnnnnnnnnnnnnnnnnnnnnnnnnnnnnnnnnnnnnnnnnnnnnnnnnnnnnnnnnnnnnnnnnnnnnnnnnnnnnnnnnnnnnnnnnnnnnnnnnnnnnnnnnnnnnnnnnnnnnnnnnnnnnnnnnnnnnnnnnnnnnnnnnnnnnnnnnnnnnnnnnnnnnnnnnnnnnnnnnnnnnnnnnnnnnnnnnnnnnnnnnnnnnnnnnnnnnnnnnnnnnnnnnnnnnnnnnnnnnnnnnnnnnnnnnnnnnnnnnnnnnnnnnnnnnnnnnnnnnnnnnnnnnnnnnnnnnnnnnnnnnnnnnnnnnnnnnnnnnnnnnnnnnnnnnnnnnnnnnnnnnnnnnnnnnnnnnnnnnnnnnnnnnnnnnnnnnnnnnnnnnnnnnnnnnnnnnnnnnnnnnnnnnnnnnnnnnnnnnnnnnnnnnnnnnnnnnnnnnnnnnnnnnnnnnnnnnnnnnnnnnnnnnnnnnnnnnnnnnnnnnnnnnnnnnnnnnnnnnnnnnnnnnnnnnnnnnnnnnnnnnnnnnnnnnnnnnnnnnnnnnnnnnnnnnnnnnnnnnnnnnnnnnnnnnnnnnnnnnnnnnnnnnnnnnnnnnnnnnnnnnnnnnnnnnnnnnnnnnnnnnnnnnnnnnnnnnnnnnnnnnnnnnnnnnnnnnnnnnnnnnnnnnnnnnnnnnnnnnnnnnnnnnnnnnnnnnnnnnnnnnnnnnnnnnnnnnnnnnnnnnnnnnnnnnnnnnnnnnnnnnnnnnnnnnnnnnnnnnnnnnnnnnnnnnnnnnnnnnnnnnnnnnnnnnnnnnnnnnnnnnnnnnnnnnnnnnnnnnnnnnnnnnnnnnnnnnnnnnnnnnnnnnnnnnnnnnnnnnnnnnnnnnnnnnnnnnnnnnnnnnnnnnnnnnnnnnnnnnnnnnnnnnnnnnnnnnnnnnnnnnnnnnnnnnnnnnnnnnnnnnnnnnnnnnnnnnnnnnnnnnnnnnnnnnnnnnnnnnnnnnnnnnnnnnnnnnnnnnnnnnnnnnnnnnnnnnnnnnnnnnnnnnnnnnnnnnnnnnnnnnnnnnnnnnnnnnnnnnnnnnnnnnnnnnnnnnnnnnnnnnnnnnnnnnnnnnnnnnnnnnnnnnnnnnnnnnnnnnnnnnnnnnnnnnnnnnnnnnnnnnnnnnnnnnnnnnnnnnnnnnnnnnnnnnnnnnnnnnnnnnnnnnnnnnnnnnnnnnnnnnnnnnnnnnnnnnnnnnnnnnnnnnnnnnnnnnnnnnnnnnnnnnnnnnnnnnnnnnnnnnnnnnnnnnnnnnnnnnnnnnnnnnnnnnnnnnnnnnnnnnnnnnnnnnnnnnnnnnnnnnnnnnnnnnnnnnnnnnnnnnnnnnnnnnnnnnnnnnnnnnnnnnnnnnnnnnnnnnnnnnnnnnnnnnnnnnnnnnnnnnnnnnnnnnnnnnnnnnnnnnnnnnnnnnnnnnnnnnnnnnnnnnnnnnnnnnnnnnnnnnnnnnnnnnnnnnnnnnnnnnnnnnnnnnnnnnnnnnnnnnnnnnnnnnnnnnnnnnnnnnnnnnnnnnnnnnnnnnnnnnnnnnnnnnnnnnnnnnnnnnnnnnnnnnnnnnnnnnnnnnnnnnnnnnnnnnnnnnnnnnnnnnnnnnnnnnnnnnnnnnnnnnnnnnnnnnnnnnnnnnnnnnnnnnnnnnnnnnnnnnnnnnnnnnnnnnnnnnnnnnnnnnnnnnnnnnnnnnnnnnnnnnnnnnnnnnnnnnnnnnnnnnnnnnnnnnnnnnnnnnnnnnnnnnnnnnnnnnnnnnnnnnnnnnnnnnnnnnnnnnnnnnnnnnnnnnnnnnnnnnnnnnnnnnnnnnnnnnnnnnnnnnnnnnnnnnnnnnnnnnnnnnnnnnnnnnnnnnnnnnnnnnnnnnnnnnnnnnnnnnnnnnnnnnnnnnnnnnnnnnnnnnnnnnnnnnnnnnnnnnnnnnnnnnnnnnnnnnnnnnnnnnnnnnnnnnnnnnnnnnnnnnnnnnnnnnnnnnnnnnnnnnnnnnnnnnnnnnnnnnnnnnnnnnnnnnnnnnnnnnnnnnnnnnnnnnnnnnnnnnnnnnnnnnnnnnnnnnnnnnnnnnnnnnnnnnnnnnnnnnnnnnnnnnnnnnnnnnnnnnnnnnnnnnnnnnnnnnnnnnnnnnnnnnnnnnnnnnnnnnnnnnnnnnnnnnnnnnnnnnnnnnnnnnnnnnnnnnnnnnnnnnnnnnnnnnnnnnnnnnnnnnnnnnnnnnnnnnnnnnnnnnnnnnnnnnnnnnnnnnnnnnnnnnnnnnnnnnnnnnnnnnnnnnnnnnnnnnnnnnnnnnnnnnnnnnnnnnnnnnnnnnnnnnnnnnnnnnnnnnnnnnnnnnnnnnnnnnnnnnnnnnnnnnnnnnnnnnnnnnnnnnnnnnnnnnnnnnnnnnnnnnnnnnnnnnnnnnnnnnnnnnnnnnnnnnnnnnnnnnnnnnnnnnnnnnnnnnnnnnnnnnnnnnnnnnnnnnnnnnnnnnnnnnnnnnnnnnnnnnnnnnnnnnnnnnnnnnnnnnnnnnnnnnnnnnnnnnnnnnnnnnnnnnnnnnnnnnnnnnnnnnnnnnnnnnnnnnnnnnnnnnnnnnnnnnnnnnnnnnnnnnnnnnnnnnnnnnnnnnnnnnnnnnnnnnnnnnnnnnnnnnnnnnnnnnnnnnnnnnnnnnnnnnnnnnnnnnnnnnnnnnnnnnnnnnnnnnnnnnnnnnnnnnnnnnnnnnnnnnnnnnnnnnnnnnnnnnnnnnnnnnnnnnnnnnnnnnnnnnnnnnnnnnnnnnnnnnnnnnnnnnnnnnnnnnnnnnnnnnnnnnnnnnnnnnnnnnnnnnnnnnnnnnnnnnnnnnnnnnnnnnnnnnnnnnnnnnnnnnnnnnnnnnnnnnnnnnnnnnnnnnnnnnnnnnnnnnnnnnnnnnnnnnnnnnnnnnnnnnnnnnnnnnnnnnnnnnnnnnnnnnnnnnnnnnnnnnnnnnnnnnnnnnnnnnnnnnnnnnnnnnnnnnnnnnnnnnnnnnnnnnnnnnnnnnnnnnnnnnnnnnnnnnnnnnnnnnnnnnnnnnnnnnnnnnnnnnnnnnnnnnnnnnnnnnnnnnnnnnnnnnnnnnnnnnnnnnnnnnnnnnnnnnnnnnnnnnnnnnnnnnnnnnnnnnnnnnnnnnnnnnnnnnnnnnnnnnnnnnnnnnnnnnnnnnnnnnnnnnnnnnnnnnnnnnnnnnnnnnnnnnnnnnnnnnnnnnnnnnnnnnnnnnnnnnnnnnnnnnnnnnnnnnnnnnnnnnnnnnnnnnnnnnnnnnnnnnnnnnnnnnnnnnnnnnnnnnnnnnnnnnnnnnnnnnnnnnnnnnnnnnnnnnnnnnnnnnnnnnnnnnnnnnnnnnnnnnnnnnnnnnnnnnnnnnnnnnnnnnnnnnnnnnnnnnnnnnnnnnnnnnnnnnnnnnnnnnnnnnnnnnnnnnnnnnnnnnnnnnnnnnnnnnnnnnnnnnnnnnnnnnnnnnnnnnnnnnnnnnnnnnnnnnnnnnnnnnnnnnnnnnnnnnnnnnnnnnnnnnnnnnnnnnnnnnnnnnnnnnnnnnnnnnnnnnnnnnnnnnnnnnnnnnnnnnnnnnnnnnnnnnnnnnnnnnnnnnnnnnnnnnnnnnnnnnnnnnnnnnnnnnnnnnnnnnnnnnnnnnnnnnnnnnnnnnnnnnnnnnnnnnnnnnnnnnnnnnnnnnnnnnnnnnnnnnnnnnnnnnnnnnnnnnnnnnnnnnnnnnnnnnnnnnnnnnnnnnnnnnnnnnnnnnnnnnnnnnnnnnnnnnnnnnnnnnnnnnnnnnnnnnnnnnnnnnnnnnnnnnnnnnnnnnnnnnnnnnnnnnnnnnnnnnnnnnnnnnnnnnnnnnnnnnnnnnnnnnnnnnnnnnnnnnnnnnnnnnnnnnnnnnnnnnnnnnnnnnnnnnnnnnnnnnnnnnnnnnnnnnnnnnnnnnnnnnnnnnnnnnnnnnnnnnnnnnnnnnnnnnnnnnnnnnnnnnnnnnnnnnnnnnnnnnnnnnnnnnnnnnnnnnnnnnnnnnnnnnnnnnnnnnnnnnnnnnnnnnnnnnnnnnnnnnnnnnnnnnnnnnnnnnnnnnnnnnnnnnnnnnnnnnnnnnnnnnnnnnnnnnnnnnnnnnnnnnnnnnnnnnnnnnnnnnnnnnnnnnnnnnnnnnnnnnnnnnnnnnnnnnnnnnnnnnnnnnnnnnnnnnnnnnnnnnnnnnnnnnnnnnnnnnnnnnnnnnnnnnnnnnnnnnnnnnnnnnnnnnnnnnnnnnnnnnnnnnnnnnnnnnnnnnnnnnnnnnnnnnnnnnnnnnnnnnnnnnnnnnnnnnnnnnnnnnnnnnnnnnnnnnnnnnnnnnnnnnnnnnnnnnnnnnnnnnnnnnnnnnnnnnnnnnnnnnnnnnnnnnnnnnnnnnnnnnnnnnnnnnnnnnnnnnnnnnnnnnnnnnnnnnnnnnnnnnnnnnnnnnnnnnnnnnnnnnnnnnnnnnnnnnnnnnnnnnnnnnnnnnnnnnnnnnnnnnnnnnnnnnnnnnnnnnnnnnnnnnnnnnnnnnnnnnnnnnnnnnnnnnnnnnnnnnnnnnnnnnnnnnnnnnnnnnnnnnnnnnnnnnnnnnnnnnnnnnnnnnnnnnnnnnnnnnnnnnnnnnnnnnnnnnnnnnnnnnnnnnnnnnnnnnnnnnnnnnnnnnnnnnnnnnnnnnnnnnnnnnnnnnnnnnnnnnnnnnnnnnnnnnnnnnnnnnnnnnnnnnnnnnnnnnnnnnnnnnnnnnnnnnnnnnnnnnnnnnnnnnnnnnnnnnnnnnnnnnnnnnnnnnnnnnnnnnnnnnnnnnnnnnnnnnnnnnnnnnnnnnnnnnnnnnnnnnnnnnnnnnnnnnnnnnnnnnnnnnnnnnnnnnnnnnnnnnnnnnnnnnnnnnnnnnnnnnnnnnnnnnnnnnnnnnnnnnnnnnnnnnnnnnnnnnnnnnnnnnnnnnnnnnnnnnnnnnnnnnnnnnnnnnnnnnnnnnnnnnnnnnnnnnnnnnnnnnnnnnnnnnnnnnnnnnnnnnnnnnnnnnnnnnnnnnnnnnnnnnnnnnnnnnnnnnnnnnnnnnnnnnnnnnnnnnnnnnnnnnnnnnnnnnnnnnnnnnnnnnnnnnnnnnnnnnnnnnnnnnnnnnnnnnnnnnnnnnnnnnnnnnnnnnnnnnnnnnnnnnnnnnnnnnnnnnnnnnnnnnnnnnnnnnnnnnnnnnnnnnnnnnnnnnnnnnnnnnnnnnnnnnnnnnnnnnnnnnnnnnnnnnnnnnnnnnnnnnnnnnnnnnnnnnnnnnnnnnnnnnnnnnnnnnnnnnnnnnnnnnnnnnnnnnnnnnnnnnnnnnnnnnnnnnnnnnnnnnnnnnnnnnnnnnnnnnnnnnnnnnnnnnnnnnnnnnnnnnnnnnnnnnnnnnnnnnnnnnnnnnnnnnnnnnnnnnnnnnnnnnnnnnnnnnnnnnnnnnnnnnnnnnnnnnnnnnnnnnnnnnnnnnnnnnnnnnnnnnnnnnnnnnnnnnnnnnnnnnnnnnnnnnnnnnnnnnnnnnnnnnnnnnnnnnnnnnnnnnnnnnnnnnnnnnnnnnnnnnnnnnnnnnnnnnnnnnnnnnnnnnnnnnnnnnnnnnnnnnnnnnnnnnnnnnnnnnnnnnnnnnnnnnnnnnnnnnnnnnnnnnnnnnnnnnnnnnnnnnnnnnnnnnnnnnnnnnnnnnnnnnnnnnnnnnnnnnnnnnnnnnnnnnnnnnnnnnnnnnnnnnnnnnnnnnnnnnnnnnnnnnnnnnnnnnnnnnnnnnnnnnnnnnnnnnnnnnnnnnnnnnnnnnnnnnnnnnnnnnnnnnnnnnnnnnnnnnnnnnnnnnnnnnnnnnnnnnnnnnnnnnnnnnnnnnnnnnnnnnnnnnnnnnnnnnnnnnnnnnnnnnnnnnnnnnnnnnnnnnnnnnnnnnnnnnnnnnnnnnnnnnnnnnnnnnnnnnnnnnnnnnnnnnnnnnnnnnnnnnnnnnnnnnnnnnnnnnnnnnnnnnnnnnnnnnnnnnnnnnnnnnnnnnnnnnnnnnnnnnnnnnnnnnnnnnnnnnnnnnnnnnnnnnnnnnnnnnnnnnnnnnnnnnnnnnnnnnnnnnnnnnnnnnnnnnnnnnnnnnnnnnnnnnnnnnnnnnnnnnnnnnnnnnnnnnnnnnnnnnnnnnnnnnnnnnnnnnnnnnnnnnnnnnnnnnnnnnnnnnnnnnnnnnnnnnnnnnnnnnnnnnnnnnnnnnnnnnnnnnnnnnnnnnnnnnnnnnnnnnnnnnnnnnnnnnnnnnnnnnnnnnnnnnnnnnnnnnnnnnnnnnnnnnnnnnnnnnnnnnnnnnnnnnnnnnnnnnnnnnnnnnnnnnnnnnnnnnnnnnnnnnnnnnnnnnnnnnnnnnnnnnnnnnnnnnnnnnnnnnnnnnnnnnnnnnnnnnnnnnnnnnnnnnnnnnnnnnnnnnnnnnnnnnnnnnnnnnnnnnnnnnnnnnnnnnnnnnnnnnnnnnnnnnnnnnnnnnnnnnnnnnnnnnnnnnnnnnnnnnnnnnnnnnnnnnnnnnnnnnnnnnnnnnnnnnnnnnnnnnnnnnnnnnnnnnnnnnnnnnnnnnnnnnnnnnnnnnnnnnnnnnnnnnnnnnnnnnnnnnnnnnnnnnnnnnnnnnnnnnnnnnnnnnnnnnnnnnnnnnnnnnnnnnnnnnnnnnnnnnnnnnnnnnnnnnnnnnnnnnnnnnnnnnnnnnnnnnnnnnnnnnnnnnnnnnnnnnnnnnnnnnnnnnnnnnnnnnnnnnnnnnnnnnnnnnnnnnnnnnnnnnnnnnnnnnnnnnnnnnnnnnnnnnnnnnnnnnnnnnnnnnnnnnnnnnnnnnnnnnnnnnnnnnnnnnnnnnnnnnnnnnnnnnnnnnnnnnnnnnnnnnnnnnnnnnnnnnnnnnnnnnnnnnnnnnnnnnnnnnnnnnnnnnnnnnnnnnnnnnnnnnnnnnnnnnnnnnnnnnnnnnnnnnnnnnnnnnnnnnnnnnnnnnnnnnnnnnnnnnnnnnnnnnnnnnnnnnnnnnnnnnnnnnnnnnnnnnnnnnnnnnnnnnnnnnnnnnnnnnnnnnnnnnnnnnnnnnnnnnnnnnnnnnnnnnnnnnnnnnnnnnnnnnnnnnnnnnnnnnnnnnnnnnnnnnnnnnnnnnnnnnnnnnnnnnnnnnnnnnnnnnnnnnnnnnnnnnnnnnnnnnnnnnnnnnnnnnnnnnnnnnnnnnnnnnnnnnnnnnnnnnnnnnnnnnnnnnnnnnnnnnnnnnnnnnnnnnnnnnnnnnnnnnnnnnnnnnnnnnnnnnnnnnnnnnnnnnnnnnnnnnnnnnnnnnnnnnnnnnnnnnnnnnnnnnnnnnnnnnnnnnnnnnnnnnnnnnnnnnnnnnnnnnnnnnnnnnnnnnnnnnnnnnnnnnnnnnnnnnnnnnnnnnnnnnnnnnnnnnnnnnnnnnnnnnnnnnnnnnnnnnnnnnnnnnnnnnnnnnnnnnnnnnnnnnnnnnnnnnnnnnnnnnnnnnnnnnnnnnnnnnnnnnnnnnnnnnnnnnnnnnnnnnnnnnnnnnnnnnnnnnnnnnnnnnnnnnnnnnnnnnnnnnnnnnnnnnnnnnnnnnnnnnnnnnnnnnnnnnnnnnnnnnnnnnnnnnnnnnnnnnnnnnnnnnnnnnnnnnnnnnnnnnnnnnnnnnnnnnnnnnnnnnnnnnnnnnnnnnnnnnnnnnnnnnnnnnnnnnnnnnnnnnnnnnnnnnnnnnnnnnnnnnnnnnnnnnnnnnnnnnnnnnnnnnnnnnnnnnnnnnnnnnnnnnnnnnnnnnnnnnnnnnnnnnnnnnnnnnnnnnnnnnnnnnnnnnnnnnnnnnnnnnnnnnnnnnnnnnnnnnnnnnnnnnnnnnnnnnnnnnnnnnnnnnnnnnnnnnnnnnnnnnnnnnnnnnnnnnnnnnnnnnnnnnnnnnnnnnnnnnnnnnnnnnnnnnnnnnnnnnnnnnnnnnnnnnnnnnnnnnnnnnnnnnnnnnnnnnnnnnnnnnnnnnnnnnnnnnnnnnnnnnnnnnnnnnnnnnnnnnnnnnnnnnnnnnnnnnnnnnnnnnnnnnnnnnnnnnnnnnnnnnnnnnnnnnnnnnnnnnnnnnnnnnnnnnnnnnnnnnnnnnnnnnnnnnnnnnnnnnnnnnnnnnnnnnnnnnnnnnnnnnnnnnnnnnnnnnnnnnnnnnnnnnnnnnnnnnnnnnnnnnnnnnnnnnnnnnnnnnnnnnnnnnnnnnnnnnnnnnnnnnnnnnnnnnnnnnnnnnnnnnnnnnnnnnnnnnnnnnnnnnnnnnnnnnnnnnnnnnnnnnnnnnnnnnnnnnnnnnnnnnnnnnnnnnnnnnnnnnnnnnnnnnnnnnnnnnnnnnnnnnnnnnnnnnnnnnnnnnnnnnnnnnnnnnnnnnnnnnnnnnnnnnnnnnnnnnnnnnnnnnnnnnnnnnnnnnnnnnnnnnnnnnnnnnnnnnnnnnnnnnnnnnnnnnnnnnnnnnnnnnnnnnnnnnnnnnnnnnnnnnnnnnnnnnnnnnnnnnnnnnnnnnnnnnnnnnnnnnnnnnnnnnnnnnnnnnnnnnnnnnnnnnnnnnnnnnnnnnnnnnnnnnnnnnnnnnnnnnnnnnnnnnnnnnnnnnnnnnnnnnnnnnnnnnnnnnnnnnnnnnnnnnnnnnnnnnnnnnnnnnnnnnnnnnnnnnnnnnnnnnnnnnnnnnnnnnnnnnnnnnnnnnnnnnnnnnnnnnnnnnnnnnnnnnnnnnnnnnnnnnnnnnnnnnnnnnnnnnnnnnnnnnnnnnnnnnnnnnnnnnnnnnnnnnnnnnnnnnnnnnnnnnnnnnnnnnnnnnnnnnnnnnnnnnnnnnnnnnnnnnnnnnnnnnnnnnnnnnnnnnnnnnnnnnnnnnnnnnnnnnnnnnnnnnnnnnnnnnnnnnnnnnnnnnnnnnnnnnnnnnnnnnnnnnnnnnnnnnnnnnnnnnnnnnnnnnnnnnnnnnnnnnnnnnnnnnnnnnnnnnnnnnnnnnnnnnnnnnnnnnnnnnnnnnnnnnnnnnnnnnnnnnnnnnnnnnnnnnnnnnnnnnnnnnnnnnnnnnnnnnnnnnnnnnnnnnnnnnnnnnnnnnnnnnnnnnnnnnnnnnnnnnnnnnnnnnnnnnnnnnnnnnnnnnnnnnnnnnnnnnnnnnnnnnnnnnnnnnnnnnnnnnnnnnnnnnnnnnnnnnnnnnnnnnnnnnnnnnnnnnnnnnnnnnnnnnnnnnnnnnnnnnnnnnnnnnnnnnnnnnnnnnnnnnnnnnnnnnnnnnnnnnnnnnnnnnnnnnnnnnnnnnnnnnnnnnnnnnnnnnnnnnnnnnnnnnnnnnnnnnnnnnnnnnnnnnnnnnnnnnnnnnnnnnnnnnnnnnnnnnnnnnnnnnnnnnnnnnnnnnnnnnnnnnnnnnnnnnnnnnnnnnnnnnnnnnnnnnnnnnnnnnnnnnnnnnnnnnnnnnnnnnnnnnnnnnnnnnnnnnnnnnnnnnnnnnnnnnnnnnnnnnnnnnnnnnnnnnnnnnnnnnnnnnnnnnnnnnnnnnnnnnnnnnnnnnnnnnnnnnnnnnnnnnnnnnnnnnnnnnnnnnnnnnnnnnnnnnnnnnnnnnnnnnnnnnnnnnnnnnnnnnnnnnnnnnnnnnnnnnnnnnnnnnnnnnnnnnnnnnnnnnnnnnnnnnnnnnnnnnnnnnnnnnnnnnnnnnnnnnnnnnnnnnnnnnnnnnnnnnnnnnnnnnnnnnnnnnnnnnnnnnnnnnnnnnnnnnnnnnnnnnnnnnnnnnnnnnnnnnnnnnnnnnnnnnnnnnnnnnnnnnnnnnnnnnnnnnnnnnnnnnnnnnnnnnnnnnnnnnnnnnnnnnnnnnnnnnnnnnnnnnnnnnnnnnnnnnnnnnnnnnnnnnnnnnnnnnnnnnnnnnnnnnnnnnnnnnnnnnnnnnnnnnnnnnnnnnnnnnnnnnnnnnnnnnnnnnnnnnnnnnnnnnnnnnnnnnnnnnnnnnnnnnnnnnnnnnnnnnnnnnnnnnnnnnnnnnnnnnnnnnnnnnnnnnnnnnnnnnnnnnnnnnnnnnnnnnnnnnnnnnnnnnnnnnnnnnnnnnnnnnnnnnnnnnnnnnnnnnnnnnnnnnnnnnnnnnnnnnnnnnnnnnnnnnnnnnnnnnnnnnnnnnnnnnnnnnnnnnnnnnnnnnnnnnnnnnnnnnnnnnnnnnnnnnnnnnnnnnnnnnnnnnnnnnnnnnnnnnnnnnnnnnnnnnnnnnnnnnnnnnnnnnnnnnnnnnnnnnnnnnnnnnnnnnnnnnnnnnnnnnnnnnnnnnnnnnnnnnnnnnnnnnnnnnnnnnnnnnnnnnnnnnnnnnnnnnnnnnnnnnnnnnnnnnnnnnnnnnnnnnnnnnnnnnnnnnnnnnnnnnnnnnnnnnnnnnnnnnnnnnnnnnnnnnnnnnnnnnnnnnnnnnnnnnnnnnnnnnnnnnnnnnnnnnnnnnnnnnnnnnnnnnnnnnnnnnnnnnnnnnnnnnnnnnnnnnnnnnnnnnnnnnnnnnnnnnnnnnnnnnnnnnnnnnnnnnnnnnnnnnnnnnnnnnnnnnnnnnnnnnnnnnnnnnnnnnnnnnnnnnnnnnnnnnnnnnnnnnnnnnnnnnnnnnnnnnnnnnnnnnnnnnnnnnnnnnnnnnnnnnnnnnnnnnnnnnnnnnnnnnnnnnnnnnnnnnnnnnnnnnnnnnnnnnnnnnnnnnnnnnnnnnnnnnnnnnnnnnnnnnnnnnnnnnnnnnnnnnnnnnnnnnnnnnnnnnnnnnnnnnnnnnnnnnnnnnnnnnnnnnnnnnnnnnnnnnnnnnnnnnnnnnnnnnnnnnnnnnnnnnnnnnnnnnnnnnnnnnnnnnnnnnnnnnnnnnnnnnnnnnnnnnnnnnnnnnnnnnnnnnnnnnnnnnnnnnnnnnnnnnnnnnnnnnnnnnnnnnnnnnnnnnnnnnnnnnnnnnnnnnnnnnnnnnnnnnnnnnnnnnnnnnnnnnnnnnnnnnnnnnnnnnnnnnnnnnnnnnnnnnnnnnnnnnnnnnnnnnnnnnnnnnnnnnnnnnnnnnnnnnnnnnnnnnnnnnnnnnnnnnnnnnnnnnnnnnnnnnnnnnnnnnnnnnnnnnnnnnnnnnnnnnnnnnnnnnnnnnnnnnnnnnnnnnnnnnnnnnnnnnnnnnnnnnnnnnnnnnnnnnnnnnnnnnnnnnnnnnnnnnnnnnnnnnnnnnnnnnnnnnnnnnnnnnnnnnnnnnnnnnnnnnnnnnnnnnnnnnnnnnnnnnnnnnnnnnnnnnnnnnnnnnnnnnnnnnnnnnnnnnnnnnnnnnnnnnnnnnnnnnnnnnnnnnnnnnnnnnnnnnnnnnnnnnnnnnnnnnnnnnnnnnnnnnnnnnnnnnnnnnnnnnnnnnnnnnnnnnnnnnnnnnnnnnnnnnnnnnnnnnnnnnnnnnnnnnnnnnnnnnnnnnnnnnnnnnnnnnnnnnnnnnnnnnnnnnnnnnnnnnnnnnnnnnnnnnnnnnnnnnnnnnnnnnnnnnnnnnnnnnnnnnnnnnnnnnnnnnnnnnnnnnnnnnnnnnnnnnnnnnnnnnnnnnnnnnnnnnnnnnnnnnnnnnnnnnnnnnnnnnnnnnnnnnnnnnnnnnnnnnnnnnnnnnnnnnnnnnnnnnnnnnnnnnnnnnnnnnnnnnnnnnnnnnnnnnnnnnnnnnnnnnnnnnnnnnnnnnnnnnnnnnnnnnnnnnnnnnnnnnnnnnnnnnnnnnnnnnnnnnnnnnnnnnnnnnnnnnnnnnnnnnnnnnnnnnnnnnnnnnnnnnnnnnnnnnnnnnnnnnnnnnnnnnnnnnnnnnnnnnnnnnnnnnnnnnnnnnnnnnnnnnnnnnnnnnnnnnnnnnnnnnnnnnnnnnnnnnnnnnnnnnnnnnnnnnnnnnnnnnnnnnnnnnnnnnnnnnnnnnnnnnnnnnnnnnnnnnnnnnnnnnnnnnnnnnnnnnnnnnnnnnnnnnnnnnnnnnnnnnnnnnnnnnnnnnnnnnnnnnnnnnnnnnnnnnnnnnnnnnnnnnnnnnnnnnnnnnnnnnnnnnnnnnnnnnnnnnnnnnnnnnnnnnnnnnnnnnnnnnnnnnnnnnnnnnnnnnnnnnnnnnnnnnnnnnnnnnnnnnnnnnnnnnnnnnnnnnnnnnnnnnnnnnnnnnnnnnnnnnnnnnnnnnnnnnnnnnnnnnnnnnnnnnnnnnnnnnnnnnnnnnnnnnnnnnnnnnnnnnnnnnnnnnnnnnnnnnnnnnnnnnnnnnnnnnnnnnnnnnnnnnnnnnnnnnnnnnnnnnnnnnnnnnnnnnnnnnnnnnnnnnnnnnnnnnnnnnnnnnnnnnnnnnnnnnnnnnnnnnnnnnnnnnnnnnnnnnnnnnnnnnnnnnnnnnnnnnnnnnnnnnnnnnnnnnnnnnnnnnnnnnnnnnnnnnnnnnnnnnnnnnnnnnnnnnnnnnnnnnnnnnnnnnnnnnnnnnnnnnnnnnnnnnnnnnnnnnnnnnnnnnnnnnnnnnnnnnnnnnnnnnnnnnnnnnnnnnnnnnnnnnnnnnnnnnnnnnnnnnnnnnnnnnnnnnnnnnnnnnnnnnnnnnnnnnnnnnnnnnnnnnnnnnnnnnnnnnnnnnnnnnnnnnnnnnnnnnnnnnnnnnnnnnnnnnnnnnnnnnnnnnnnnnnnnnnnnnnnnnnnnnnnnnnnnnnnnnnnnnnnnnnnnnnnnnnnnnnnnnnnnnnnnnnnnnnnnnnnnnnnnnnnnnnnnnnnnnnnnnnnnnnnnnnnnnnnnnnnnnnnnnnnnnnnnnnnnnnnnnnnnnnnnnnnnnnnnnnnnnnnnnnnnnnnnnnnnnnnnnnnnnnnnnnnnnnnnnnnnnnnnnnnnnnnnnnnnnnnnnnnnnnnnnnnnnnnnnnnnnnnnnnnnnnnnnnnnnnnnnnnnnnnnnnnnnnnnnnnnnnnnnnnnnnnnnnnnnnnnnnnnnnnnnnnnnnnnnnnnnnnnnnnnnnnnnnnnnnnnnnnnnnnnnnnnnnnnnnnnnnnnnnnnnnnnnnnnnnnnnnnnnnnnnnnnnnnnnnnnnnnnnnnnnnnnnnnnnnnnnnnnnnnnnnnnnnnnnnnnnnnnnnnnnnnnnnnnnnnnnnnnnnnnnnnnnnnnnnnnnnnnnnnnnnnnnnnnnnnnnnnnnnnnnnnnnnnnnnnnnnnnnnnnnnnnnnnnnnnnnnnnnnnnnnnnnnnnnnnnnnnnnnnnnnnnnnnnnnnnnnnnnnnnnnnnnnnnnnnnnnnnnnnnnnnnnnnnnnnnnnnnnnnnnnnnnnnnnnnnnnnnnnnnnnnnnnnnnnnnnnnnnnnnnnnnnnnnnnnnnnnnnnnnnnnnnnnnnnnnnnnnnnnnnnnnnnnnnnnnnnnnnnnnnnnnnnnnnnnnnnnnnnnnnnnnnnnnnnnnnnnnnnnnnnnnnnnnnnnnnnnnnnnnnnnnnnnnnnnnnnnnnnnnnnnnnnnnnnnnnnnnnnnnnnnnnnnnnnnnnnnnnnnnnnnnnnnnnnnnnnnnnnnnnnnnnnnnnnnnnnnnnnnnnnnnnnnnnnnnnnnnnnnnnnnnnnnnnnnnnnnnnnnnnnnnnnnnnnnnnnnnnnnnnnnnnnnnnnnnnnnnnnnnnnnnnnnnnnnnnnnnnnnnnnnnnnnnnnnnnnnnnnnnnnnnnnnnnnnnnnnnnnnnnnnnnnnnnnnnnnnnnnnnnnnnnnnnnnnnnnnnnnnnnnnnnnnnnnnnnnnnnnnnnnnnnnnnnnnnnnnnnnnnnnnnnnnnnnnnnnnnnnnnnnnnnnnnnnnnnnnnnnnnnnnnnnnnnnnnnnnnnnnnnnnnnnnnnnnnnnnnnnnnnnnnnnnnnnnnnnnnnnnnnnnnnnnnnnnnnnnnnnnnnnnnnnnnnnnnnnnnnnnnnnnnnnnnnnnnnnnnnnnnnnnnnnnnnnnnnnnnnnnnnnnnnnnnnnnnnnnnnnnnnnnnnnnnnnnnnnnnnnnnnnnnnnnnnnnnnnnnnnnnnnnnnnnnnnnnnnnnnnnnnnnnnnnnnnnnnnnnnnnnnnnnnnnnnnnnnnnnnnnnnnnnnnnnnnnnnnnnnnnnnnnnnnnnnnnnnnnnnnnnnnnnnnnnnnnnnnnnnnnnnnnnnnnnnnnnnnnnnnnnnnnnnnnnnnnnnnnnnnnnnnnnnnnnnnnnnnnnnnnnnnnnnnnnnnnnnnnnnnnnnnnnnnnnnnnnnnnnnnnnnnnnnnnnnnnnnnnnnnnnnnnnnnnnnnnnnnnnnnnnnnnnnnnnnnnnnnnnnnnnnnnnnnnnnnnnnnnnnnnnnnnnnnnnnnnnnnnnnnnnnnnnnnnnnnnnnnnnnnnnnnnnnnnnnnnnnnnnnnnnnnnnnnnnnnnnnnnnnnnnnnnnnnnnnnnnnnnnnnnnnnnnnnnnnnnnnnnnnnnnnnnnnnnnnnnnnnnnnnnnnnnnnnnnnnnnnnnnnnnnnnnnnnnnnnnnnnnnnnnnnnnnnnnnnnnnnnnnnnnnnnnnnnnnnnnnnnnnnnnnnnnnnnnnnnnnnnnnnnnnnnnnnnnnnnnnnnnnnnnnnnnnnnnnnnnnnnnnnnnnnnnnnnnnnnnnnnnnnnnnnnnnnnnnnnnnnnnnnnnnnnnnnnnnnnnnnnnnnnnnnnnnnnnnnnnnnnnnnnnnnnnnnnnnnnnnnnnnnnnnnnnnnnnnnnnnnnnnnnnnnnnnnnnnnnnnnnnnnnnnnnnnnnnnnnnnnnnnnnnnnnnnnnnnnnnnnnnnnnnnnnnnnnnnnnnnnnnnnnnnnnnnnnnnnnnnnnnnnnnnnnnnnnnnnnnnnnnnnnnnnnnnnnnnnnnnnnnnnnnnnnnnnnnnnnnnnnnnnnnnnnnnnnnnnnnnnnnnnnnnnnnnnnnnnnnnnnnnnnnnnnnnnnnnnnnnnnnnnnnnnnnnnnnnnnnnnnnnnnnnnnnnnnnnnnnnnnnnnnnnnnnnnnnnnnnnnnnnnnnnnnnnnnnnnnnnnnnnnnnnnnnnnnnnnnnnnnnnnnnnnnnnnnnnnnnnnnnnnnnnnnnnnnnnnnnnnnnnnnnnnnnnnnnnnnnnnnnnnnnnnnnnnnnnnnnnnnnnnnnnnnnnnnnnnnnnnnnnnnnnnnnnnnnnnnnnnnnnnnnnnnnnnnnnnnnnnnnnnnnnnnnnnnnnnnnnnnnnnnnnnnnnnnnnnnnnnnnnnnnnnnnnnnnnnnnnnnnnnnnnnnnnnnnnnnnnnnnnnnnnnnnnnnnnnnnnnnnnnnnnnnnnnnnnnnnnnnnnnnnnnnnnnnnnnnnnnnnnnnnnnnnnnnnnnnnnnnnnnnnnnnnnnnnnnnnnnnnnnnnnnnnnnnnnnnnnnnnnnnnnnnnnnnnnnnnnnnnnnnnnnnnnnnnnnnnnnnnnnnnnnnnnnnnnnnnnnnnnnnnnnnnnnnnnnnnnnnnnnnnnnnnnnnnnnnnnnnnnnnnnnnnnnnnnnnnnnnnnnnnnnnnnnnnnnnnnnnnnnnnnnnnnnnnnnnnnnnnnnnnnnnnnnnnnnnnnnnnnnnnnnnnnnnnnnnnnnnnnnnnnnnnnnnnnnnnnnnnnnnnnnnnnnnnnnnnnnnnnnnnnnnnnnnnnnnnnnnnnnnnnnnnnnnnnnnnnnnnnnnnnnnnnnnnnnnnnnnnnnnnnnnnnnnnnnnnnnnnnnnnnnnnnnnnnnnnnnnnnnnnnnnnnnnnnnnnnnnnnnnnnnnnnnnnnnnnnnnnnnnnnnnnnnnnnnnnnnnnnnnnnnnnnnnnnnnnnnnnnnnnnnnnnnnnnnnnnnnnnnnnnnnnnnnnnnnnnnnnnnnnnnnnnnnnnnnnnnnnnnnnnnnnnnnnnnnnnnnnnnnnnnnnnnnnnnnnnnnnnnnnnnnnnnnnnnnnnnnnnnnnnnnnnnnnnnnnnnnnnnnnnnnnnnnnnnnnnnnnnnnnnnnnnnnnnnnnnnnnnnnnnnnnnnnnnnnnnnnnnnnnnnnnnnnnnnnnnnnnnnnnnnnnnnnnnnnnnnnnnnnnnnnnnnnnnnnnnnnnnnnnnnnnnnnnnnnnnnnnnnnnnnnnnnnnnnnnnnnnnnnnnnnnnnnnnnnnnnnnnnnnnnnnnnnnnnnnnnnnnnnnnnnnnnnnnnnnnnnnnnnnnnnnnnnnnnnnnnnnnnnnnnnnnnnnnnnnnnnnnnnnnnnnnnnnnnnnnnnnnnnnnnnnnnnnnnnnnnnnnnnnnnnnnnnnnnnnnnnnnnnnnnnnnnnnnnnnnnnnnnnnnnnnnnnnnnnnnnnnnnnnnnnnnnnnnnnnnnnnnnnnnnnnnnnnnnnnnnnnnnnnnnnnnnnnnnnnnnnnnnnnnnnnnnnnnnnnnnnnnnnnnnnnnnnnnnnnnnnnnnnnnnnnnnnnnnnnnnnnnnnnnnnnnnnnnnnnnnnnnnnnnnnnnnnnnnnnnnnnnnnnnnnnnnnnnnnnnnnnnnnnnnnnnnnnnnnnnnnnnnnnnnnnnnnnnnnnnnnnnnnnnnnnnnnnnnnnnnnnnnnnnnnnnnnnnnnnnnnnnnnnnnnnnnnnnnnnnnnnnnnnnnnnnnnnnnnnnnnnnnnnnnnnnnnnnnnnnnnnnnnnnnnnnnnnnnnnnnnnnnnnnnnnnnnnnnnnnnnnnnnnnnnnnnnnnnnnnnnnnnnnnnnnnnnnnnnnnnnnnnnnnnnnnnnnnnnnnnnnnnnnnnnnnnnnnnnnnnnnnnnnnnnnnnnnnnnnnnnnnnnnnnnnnnnnnnnnnnnnnnnnnnnnnnnnnnnnnnnnnnnnnnnnnnnnnnnnnnnnnnnnnnnnnnnnnnnnnnnnnnnnnnnnnnnnnnnnnnnnnnnnnnnnnnnnnnnnnnnnnnnnnnnnnnnnnnnnnnnnnnnnnnnnnnnnnnnnnnnnnnnnnnnnnnnnnnnnnnnnnnnnnnnnnnnnnnnnnnnnnnnnnnnnnnnnnnnnnnnnnnnnnnnnnnnnnnnnnnnnnnnnnnnnnnnnnnnnnnnnnnnnnnnnnnnnnnnnnnnnnnnnnnnnnnnnnnnnnnnnnnnnnnnnnnnnnnnnnnnnnnnnnnnnnnnnnnnnnnnnnnnnnnnnnnnnnnnnnnnnnnnnnnnnnnnnnnnnnnnnnnnnnnnnnnnnnnnnnnnnnnnnnnnnnnnnnnnnnnnnnnnnnnnnnnnnnnnnnnnnnnnnnnnnnnnnnnnnnnnnnnnnnnnnnnnnnnnnnnnnnnnnnnnnnnnnnnnnnnnnnnnnnnnnnnnnnnnnnnnnnnnnnnnnnnnnnnnnnnnnnnnnnnnnnnnnnnnnnnnnnnnnnnnnnnnnnnnnnnnnnnnnnnnnnnnnnnnnnnnnnnnnnnnnnnnnnnnnnnnnnnnnnnnnnnnnnnnnnnnnnnnnnnnnnnnnnnnnnnnnnnnnnnnnnnnnnnnnnnnnnnnnnnnnnnnnnnnnnnnnnnnnnnnnnnnnnnnnnnnnnnnnnnnnnnnnnnnnnnnnnnnnnnnnnnnnnnnnnnnnnnnnnnnnnnnnnnnnnnnnnnnnnnnnnnnnnnnnnnnnnnnnnnnnnnnnnnnnnnnnnnnnnnnnnnnnnnnnnnnnnnnnnnnnnnnnnnnnnnnnnnnnnnnnnnnnnnnnnnnnnnnnnnnnnnnnnnnnnnnnnnnnnnnnnnnnnnnnnnnnnnnnnnnnnnnnnnnnnnnnnnnnnnnnnnnnnnnnnnnnnnnnnnnnnnnnnnnnnnnnnnnnnnnnnnnnnnnnnnnnnnnnnnnnnnnnnnnnnnnnnnnnnnnnnnnnnnnnnnnnnnnnnnnnnnnnnnnnnnnnnnnnnnnnnnnnnnnnnnnnnnnnnnnnnnnnnnnnnnnnnnnnnnnnnnnnnnnnnnnnnnnnnnnnnnnnnnnnnnnnnnnnnnnnnnnnnnnnnnnnnnnnnnnnnnnnnnnnnnnnnnnnnnnnnnnnnnnnnnnnnnnnnnnnnnnnnnnnnnnnnnnnnnnnnnnnnnnnnnnnnnnnnnnnnnnnnnnnnnnnnnnnnnnnnnnnnnnnnnnnnnnnnnnnnnnnnnnnnnnnnnnnnnnnnnnnnnnnnnnnnnnnnnnnnnnnnnnnnnnnnnnnnnnnnnnnnnnnnnnnnnnnnnnnnnnnnnnnnnnnnnnnnnnnnnnnnnnnnnnnnnnnnnnnnnnnnnnnnnnnnnnnnnnnnnnnnnnnnnnnnnnnnnnnnnnnnnnnnnnnnnnnnnnnnnnnnnnnnnnnnnnnnnnnnnnnnnnnnnnnnnnnnnnnnnnnnnnnnnnnnnnnnnnnnnnnnnnnnnnnnnnnnnnnnnnnnnnnnnnnnnnnnnnnnnnnnnnnnnnnnnnnnnnnnnnnnnnnnnnnnnnnnnnnnnnnnnnnnnnnnnnnnnnnnnnnnnnnnnnnnnnnnnnnnnnnnnnnnnnnnnnnnnnnnnnnnnnnnnnnnnnnnnnnnnnnnnnnnnnnnnnnnnnnnnnnnnnnnnnnnnnnnnnnnnnnnnnnnnnnnnnnnnnnnnnnnnnnnnnnnnnnnnnnnnnnnnnnnnnnnnnnnnnnnnnnnnnnnnnnnnnnnnnnnnnnnnnnnnnnnnnnnnnnnnnnnnnnnnnnnnnnnnnnnnnnnnnnnnnnnnnnnnnnnnnnnnnnnnnnnnnnnnnnnnnnnnnnnnnnnnnnnnnnnnnnnnnnnnnnnnnnnnnnnnnnnnnnnnnnnnnnnnnnnnnnnnnnnnnnnnnnnnnnnnnnnnnnnnnnnnnnnnnnnnnnnnnnnnnnnnnnnnnnnnnnnnnnnnnnnnnnnnnnnnnnnnnnnnnnnnnnnnnnnnnnnnnnnnnnnnnnnnnnnnnnnnnnnnnnnnnnnnnnnnnnnnnnnnnnnnnnnnnnnnnnnnnnnnnnnnnnnnnnnnnnnnnnnnnnnnnnnnnnnnnnnnnnnnnnnnnnnnnnnnnnnnnnnnnnnnnnnnnnnnnnnnnnnnnnnnnnnnnnnnnnnnnnnnnnnnnnnnnnnnnnnnnnnnnnnnnnnnnnnnnnnnnnnnnnnnnnnnnnnnnnnnnnnnnnnnnnnnnnnnnnnnnnnnnnnnnnnnnnnnnnnnnnnnnnnnnnnnnnnnnnnnnnnnnnnnnnnnnnnnnnnnnnnnnnnnnnnnnnnnnnnnnnnnnnnnnnnnnnnnnnnnnnnnnnnnnnnnnnnnnnnnnnnnnnnnnnnnnnnnnnnnnnnnnnnnnnnnnnnnnnnnnnnnnnnnnnnnnnnnnnnnnnnnnnnnnnnnnnnnnnnnnnnnnnnnnnnnnnnnnnnnnnnnnnnnnnnnnnnnnnnnnnnnnnnnnnnnnnnnnnnnnnnnnnnnnnnnnnnnnnnnnnnnnnnnnnnnnnnnnnnnnnnnnnnnnnnnnnnnnnnnnnnnnnnnnnnnnnnnnnnnnnnnnnnnnnnnnnnnnnnnnnnnnnnnnnnnnnnnnnnnnnnnnnnnnnnnnnnnnnnnnnnnnnnnnnnnnnnnnnnnnnnnnnnnnnnnnnnnnnnnnnnnnnnnnnnnnnnnnnnnnnnnnnnnnnnnnnnnnnnnnnnnnnnnnnnnnnnnnnnnnnnnnnnnnnnnnnnnnnnnnnnnnnnnnnnnnnnnnnnnnnnnnnnnnnnnnnnnnnnnnnnnnnnnnnnnnnnnnnnnnnnnnnnnnnnnnnnnnnnnnnnnnnnnnnnnnnnnnnnnnnnnnnnnnnnnnnnnnnnnnnnnnnnnnnnnnnnnnnnnnnnnnnnnnnnnnnnnnnnnnnnnnnnnnnnnnnnnnnnnnnnnnnnnnnnnnnnnnnnnnnnnnnnnnnnnnnnnnnnnnnnnnnnnnnnnnnnnnnnnnnnnnnnnnnnnnnnnnnnnnnnnnnnnnnnnnnnnnnnnnnnnnnnnnnnnnnnnnnnnnnnnnnnnnnnnnnnnnnnnnnnnnnnnnnnnnnnnnnnnnnnnnnnnnnnnnnnnnnnnnnnnnnnnnnnnnnnnnnnnnnnnnnnnnnnnnnnnnnnnnnnnnnnnnnnnnnnnnnnnnnnnnnnnnnnnnnnnnnnnnnnnnnnnnnnnnnnnnnnnnnnnnnnnnnnnnnnnnnnnnnnnnnnnnnnnnnnnnnnnnnnnnnnnnnnnnnnnnnnnnnnnnnnnnnnnnnnnnnnnnnnnnnnnnnnnnnnnnnnnnnnnnnnnnnnnnnnnnnnnnnnnnnnnnnnnnnnnnnnnnnnnnnnnnnnnnnnnnnnnnnnnnnnnnnnnnnnnnnnnnnnnnnnnnnnnnnnnnnnnnnnnnnnnnnnnnnnnnnnnnnnnnnnnnnnnnnnnnnnnnnnnnnnnnnnnnnnnnnnnnnnnnnnnnnnnnnnnnnnnnnnnnnnnnnnnnnnnnnnnnnnnnnnnnnnnnnnnnnnnnnnnnnnnnnnnnnnnnnnnnnnnnnnnnnnnnnnnnnnnnnnnnnnnnnnnnnnnnnnnnnnnnnnnnnnnnnnnnnnnnnnnnnnnnnnnnnnnnnnnnnnnnnnnnnnnnnnnnnnnnnnnnnnnnnnnnnnnnnnnnnnnnnnnnnnnnnnnnnnnnnnnnnnnnnnnnnnnnnnnnnnnnnnnnnnnnnnnnnnnnnnnnnnnnnnnnnnnnnnnnnnnnnnnnnnnnnnnnnnnnnnnnnnnnnnnnnnnnnnnnnnnnnnnnnnnnnnnnnnnnnnnnnnnnnnnnnnnnnnnnnnnnnnnnnnnnnnnnnnnnnnnnnnnnnnnnnnnnnnnnnnnnnnnnnnnnnnnnnnnnnnnnnnnnnnnnnnnnnnnnnnnnnnnnnnnnnnnnnnnnnnnnnnnnnnnnnnnnnnnnnnnnnnnnnnnnnnnnnnnnnnnnnnnnnnnnnnnnnnnnnnnnnnnnnnnnnnnnnnnnnnnnnnnnnnnnnnnnnnnnnnnnnnnnnnnnnnnnnnnnnnnnnnnnnnnnnnnnnnnnnnnnnnnnnnnnnnnnnnnnnnnnnnnnnnnnnnnnnnnnnnnnnnnnnnnnnnnnnnnnnnnnnnnnnnnnnnnnnnnnnnnnnnnnnnnnnnnnnnnnnnnnnnnnnnnnnnnnnnnnnnnnnnnnnnnnnnnnnnnnnnnnnnnnnnnnnnnnnnnnnnnnnnnnnnnnnnnnnnnnnnnnnnnnnnnnnnnnnnnnnnnnnnnnnnnnnnnnnnnnnnnnnnnnnnnnnnnnnnnnnnnnnnnnnnnnnnnnnnnnnnnnnnnnnnnnnnnnnnnnnnnnnnnnnnnnnnnnnnnnnnnnnnnnnnnnnnnnnnnnnnnnnnnnnnnnnnnnnnnnnnnnnnnnnnnnnnnnnnnnnnnnnnnnnnnnnnnnnnnnnnnnnnnnnnnnnnnnnnnnnnnnnnnnnnnnnnnnnnnnnnnnnnnnnnnnnnnnnnnnnnnnnnnnnnnnnnnnnnnnnnnnnnnnnnnnnnnnnnnnnnnnnnnnnnnnnnnnnnnnnnnnnnnnnnnnnnnnnnnnnnnnnnnnnnnnnnnnnnnnnnnnnnnnnnnnnnnnnnnnnnnnnnnnnnnnnnnnnnnnnnnnnnnnnnnnnnnnnnnnnnnnnnnnnnnnnnnnnnnnnnnnnnnnnnnnnnnnnnnnnnnnnnnnnnnnnnnnnnnnnnnnnnnnnnnnnnnnnnnnnnnnnnnnnnnnnnnnnnnnnnnnnnnnnnnnnnnnnnnnnnnnnnnnnnnnnnnnnnnnnnnnnnnnnnnnnnnnnnnnnnnnnnnnnnnnnnnnnnnnnnnnnnnnnnnnnnnnnnnnnnnnnnnnnnnnnnnnnnnnnnnnnnnnnnnnnnnnnnnnnnnnnnnnnnnnnnnnnnnnnnnnnnnnnnnnnnnnnnnnnnnnnnnnnnnnnnnnnnnnnnnnnnnnnnnnnnnnnnnnnnnnnnnnnnnnnnnnnnnnnnnnnnnnnnnnnnnnnnnnnnnnnnnnnnnnnnnnnnnnnnnnnnnnnnnnnnnnnnnnnnnnnnnnnnnnnnnnnnnnnnnnnnnnnnnnnnnnnnnnnnnnnnnnnnnnnnnnnnnnnnnnnnnnnnnnnnnnnnnnnnnnnnnnnnnnnnnnnnnnnnnnnnnnnnnnnnnnnnnnnnnnnnnnnnnnnnnnnnnnnnnnnnnnnnnnnnnnnnnnnnnnnnnnnnnnnnnnnnnnnnnnnnnnnnnnnnnnnnnnnnnnnnnnnnnnnnnnnnnnnnnnnnnnnnnnnnnnnnnnnnnnnnnnnnnnnnnnnnnnnnnnnnnnnnnnnnnnnnnnnnnnnnnnnnnnnnnnnnnnnnnnnnnnnnnnnnnnnnnnnnnnnnnnnnnnnnnnnnnnnnnnnnnnnnnnnnnnnnnnnnnnnnnnnnnnnnnnnnnnnnnnnnnnnnnnnnnnnnnnnnnnnnnnnnnnnnnnnnnnnnnnnnnnnnnnnnnnnnnnnnnnnnnnnnnnnnnnnnnnnnnnnnnnnnnnnnnnnnnnnnnnnnnnnnnnnnnnnnnnnnnnnnnnnnnnnnnnnnnnnnnnnnnnnnnnnnnnnnnnnnnnnnnnnnnnnnnnnnnnnnnnnnnnnnnnnnnnnnnnnnnnnnnnnnnnnnnnnnnnnnnnnnnnnnnnnnnnnnnnnnnnnnnnnnnnnnnnnnnnnnnnnnnnnnnnnnnnnnnnnnnnnnnnnnnnnnnnnnnnnnnnnnnnnnnnnnnnnnnnnnnnnnnnnnnnnnnnnnnnnnnnnnnnnnnnnnnnnnnnnnnnnnnnnnnnnnnnnnnnnnnnnnnnnnnnnnnnnnnnnnnnnnnnnnnnnnnnnnnnnnnnnnnnnnnnnnnnnnnnnnnnnnnnnnnnnnnnnnnnnnnnnnnnnnnnnnnnnnnnnnnnnnnnnnnnnnnnnnnnnnnnnnnnnnnnnnnnnnnnnnnnnnnnnnnnnnnnnnnnnnnnnnnnnnnnnnnnnnnnnnnnnnnnnnnnnnnnnnnnnnnnnnnnnnnnnnnnnnnnnnnnnnnnnnnnnnnnnnnnnnnnnnnnnnnnnnnnnnnnnnnnnnnnnnnnnnnnnnnnnnnnnnnnnnnnnnnnnnnnnnnnnnnnnnnnnnnnnnnnnnnnnnnnnnnnnnnnnnnnnnnnnnnnnnnnnnnnnnnnnnnnnnnnnnnnnnnnnnnnnnnnnnnnnnnnnnnnnnnnnnnnnnnnnnnnnnnnnnnnnnnnnnnnnnnnnnnnnnnnnnnnnnnnnnnnnnnnnnnnnnnnnnnnnnnnnnnnnnnnnnnnnnnnnnnnnnnnnnnnnnnnnnnnnnnnnnnnnnnnnnnnnnnnnnnnnnnnnnnnnnnnnnnnnnnnnnnnnnnnnnnnnnnnnnnnnnnnnnnnnnnnnnnnnnnnnnnnnnnnnnnnnnnnnnnnnnnnnnnnnnnnnnnnnnnnnnnnnnnnnnnnnnnnnnnnnnnnnnnnnnnnnnnnnnnnnnnnnnnnnnnnnnnnnnnnnnnnnnnnnnnnnnnnnnnnnnnnnnnnnnnnnnnnnnnnnnnnnnnnnnnnnnnnnnnnnnnnnnnnnnnnnnnnnnnnnnnnnnnnnnnnnnnnnnnnnnnnnnnnnnnnnnnnnnnnnnnnnnnnnnnnnnnnnnnnnnnnnnnnnnnnnnnnnnnnnnnnnnnnnnnnnnnnnnnnnnnnnnnnnnnnnnnnnnnnnnnnnnnnnnnnnnnnnnnnnnnnnnnnnnnnnnnnnnnnnnnnnnnnnnnnnnnnnnnnnnnnnnnnnnnnnnnnnnnnnnnnnnnnnnnnnnnnnnnnnnnnnnnnnnnnnnnnnnnnnnnnnnnnnnnnnnnnnnnnnnnnnnnnnnnnnnnnnnnnnnnnnnnnnnnnnnnnnnnnnnnnnnnnnnnnnnnnnnnnnnnnnnnnnnnnnnnnnnnnnnnnnnnnnnnnnnnnnnnnnnnnnnnnnnnnnnnnnnnnnnnnnnnnnnnnnnnnnnnnnnnnnnnnnnnnnnnnnnnnnnnnnnnnnnnnnnnnnnnnnnnnnnnnnnnnnnnnnnnnnnnnnnnnnnnnnnnnnnnnnnnnnnnnnnnnnnnnnnnnnnnnnnnnnnnnnnnnnnnnnnnnnnnnnnnnnnnnnnnnnnnnnnnnnnnnnnnnnnnnnnnnnnnnnnnnnnnnnnnnnnnnnnnnnnnnnnnnnnnnnnnnnnnnnnnnnnnnnnnnnnnnnnnnnnnnnnnnnnnnnnnnnnnnnnnnnnnnnnnnnnnnnnnnnnnnnnnnnnnnnnnnnnnnnnnnnnnnnnnnnnnnnnnnnnnnnnnnnnnnnnnnnnnnnnnnnnnnnnnnnnnnnnnnnnnnnnnnnnnnnnnnnnnnnnnnnnnnnnnnnnnnnnnnnnnnnnnnnnnnnnnnnnnnnnnnnnnnnnnnnnnnnnnnnnnnnnnnnnnnnnnnnnnnnnnnnnnnnnnnnnnnnnnnnnnnnnnnnnnnnnnnnnnnnnnnnnnnnnnnnnnnnnnnnnnnnnnnnnnnnnnnnnnnnnnnnnnnnnnnnnnnnnnnnnnnnnnnnnnnnnnnnnnnnnnnnnnnnnnnnnnnnnnnnnnnnnnnnnnnnnnnnnnnnnnnnnnnnnnnnnnnnnnnnnnnnnnnnnnnnnnnnnnnnnnnnnnnnnnnnnnnnnnnnnnnnnnnnnnnnnnnnnnnnnnnnnnnnnnnnnnnnnnnnnnnnnnnnnnnnnnnnnnnnnnnnnnnnnnnnnnnnnnnnnnnnnnnnnnnnnnnnnnnnnnnnnnnnnnnnnnnnnnnnnnnnnnnnnnnnnnnnnnnnnnnnnnnnnnnnnnnnnnnnnnnnnnnnnnnnnnnnnnnnnnnnnnnnnnnnnnnnnnnnnnnnnnnnnnnnnnnnnnnnnnnnnnnnnnnnnnnnnnnnnnnnnnnnnnnnnnnnnnnnnnnnnnnnnnnnnnnnnnnnnnnnnnnnnnnnnnnnnnnnnnnnnnnnnnnnnnnnnnnnnnnnnnnnnnnnnnnnnnnnnnnnnnnnnnnnnnnnnnnnnnnnnnnnnnnnnnnnnnnnnnnnnnnnnnnnnnnnnnnnnnnnnnnnnnnnnnnnnnnnnnnnnnnnnnnnnnnnnnnnnnnnnnnnnnnnnnnnnnnnnnnnnnnnnnnnnnnnnnnnnnnnnnnnnnnnnnnnnnnnnnnnnnnnnnnnnnnnnnnnnnnnnnnnnnnnnnnnnnnnnnnnnnnnnnnnnnnnnnnnnnnnnnnnnnnnnnnnnnnnnnnnnnnnnnnnnnnnnnnnnnnnnnnnnnnnnnnnnnnnnnnnnnnnnnnnnnnnnnnnnnnnnnnnnnnnnnnnnnnnnnnnnnnnnnnnnnnnnnnnnnnnnnnnnnnnnnnnnnnnnnnnnnnnnnnnnnnnnnnnnnnnnnnnnnnnnnnnnnnnnnnnnnnnnnnnnnnnnnnnnnnnnnnnnnnnnnnnnnnnnnnnnnnnnnnnnnnnnnnnnnnnnnnnnnnnnnnnnnnnnnnnnnnnnnnnnnnnnnnnnnnnnnnnnnnnnnnnnnnnnnnnnnnnnnnnnnnnnnnnnnnnnnnnnnnnnnnnnnnnnnnnnnnnnnnnnnnnnnnnnnnnnnnnnnnnnnnnnnnnnnnnnnnnnnnnnnnnnnnnnnnnnnnnnnnnnnnnnnnnnnnnnnnnnnnnnnnnnnnnnnnnnnnnnnnnnnnnnnnnnnnnnnnnnnnnnnnnnnnnnnnnnnnnnnnnnnnnnnnnnnnnnnnnnnnnnnnnnnnnnnnnnnnnnnnnnnnnnnnnnnnnnnnnnnnnnnnnnnnnnnnnnnnnnnnnnnnnnnnnnnnnnnnnnnnnnnnnnnnnnnnnnnnnnnnnnnnnnnnnnnnnnnnnnnnnnnnnnnnnnnnnnnnnnnnnnnnnnnnnnnnnnnnnnnnnnnnnnnnnnnnnnnnnnnnnnnnnnnnnnnnnnnnnnnnnnnnnnnnnnnnnnnnnnnnnnnnnnnnnnnnnnnnnnnnnnnnnnnnnnnnnnnnnnnnnnnnnnnnnnnnnnnnnnnnnnnnnnnnnnnnnnnnnnnnnnnnnnnnnnnnnnnnnnnnnnnnnnnnnnnnnnnnnnnnnnnnnnnnnnnnnnnnnnnnnnnnnnnnnnnnnnnnnnnnnnnnnnnnnnnnnnnnnnnnnnnnnnnnnnnnnnnnnnnnnnnnnnnnnnnnnnnnnnnnnnnnnnnnnnnnnnnnnnnnnnnnnnnnnnnnnnnnnnnnnnnnnnnnnnnnnnnnnnnnnnnnnnnnnnnnnnnnnnnnnnnnnnnnnnnnnnnnnnnnnnnnnnnnnnnnnnnnnnnnnnnnnnnnnnnnnnnnnnnnnnnnnnnnnnnnnnnnnnnnnnnnnnnnnnnnnnnnnnnnnnnnnnnnnnnnnnnnnnnnnnnnnnnnnnnnnnnnnnnnnnnnnnnnnnnnnnnnnnnnnnnnnnnnnnnnnnnnnnnnnnnnnnnnnnnnnnnnnnnnnnnnnnnnnnnnnnnnnnnnnnnnnnnnnnnnnnnnnnnnnnnnnnnnnnnnnnnnnnnnnnnnnnnnnnnnnnnnnnnnnnnnnnnnnnnnnnnnnnnnnnnnnnnnnnnnnnnnnnnnnnnnnnnnnnnnnnnnnnnnnnnnnnnnnnnnnnnnnnnnnnnnnnnnnnnnnnnnnnnnnnnnnnnnnnnnnnnnnnnnnnnnnnnnnnnnnnnnnnnnnnnnnnnnnnnnnnnnnnnnnnnnnnnnnnnnnnnnnnnnnnnnnnnnnnnnnnnnnnnnnnnnnnnnnnnnnnnnnnnnnnnnnnnnnnnnnnnnnnnnnnnnnnnnnnnnnnnnnnnnnnnnnnnnnnnnnnnnnnnnnnnnnnnnnnnnnnnnnnnnnnnnnnnnnnnnnnnnnnnnnnnnnnnnnnnnnnnnnnnnnnnnnnnnnnnnnnnnnnnnnnnnnnnnnnnnnnnnnnnnnnnnnnnnnnnnnnnnnnnnnnnnnnnnnnnnnnnnnnnnnnnnnnnnnnnnnnnnnnnnnnnnnnnnnnnnnnnnnnnnnnnnnnnnnnnnnnnnnnnnnnnnnnnnnnnnnnnnnnnnnnnnnnnnnnnnnnnnnnnnnnnnnnnnnnnnnnnnnnnnnnnnnnnnnnnnnnnnnnnnnnnnnnnnnnnnnnnnnnnnnnnnnnnnnnnnnnnnnnnnnnnnnnnnnnnnnnnnnnnnnnnnnnnnnnnnnnnnnnnnnnnnnnnnnnnnnnnnnnnnnnnnnnnnnnnnnnnnnnnnnnnnnnnnnnnnnnnnnnnnnnnnnnnnnnnnnnnnnnnnnnnnnnnnnnnnnnnnnnnnnnnnnnnnnnnnnnnnnnnnnnnnnnnnnnnnnnnnnnnnnnnnnnnnnnnnnnnnnnnnnnnnnnnnnnnnnnnnnnnnnnnnnnnnnnnnnnnnnnnnnnnnnnnnnnnnnnnnnnnnnnnnnnnnnnnnnnnnnnnnnnnnnnnnnnnnnnnnnnnnnnnnnnnnnnnnnnnnnnnnnnnnnnnnnnnnnnnnnnnnnnnnnnnnnnnnnnnnnnnnnnnnnnnnnnnnnnnnnnnnnnnnnnnnnnnnnnnnnnnnnnnnnnnnnnnnnnnnnnnnnnnnnnnnnnnnnnnnnnnnnnnnnnnnnnnnnnnnnnnnnnnnnnnnnnnnnnnnnnnnnnnnnnnnnnnnnnnnnnnnnnnnnnnnnnnnnnnnnnnnnnnnnnnnnnnnnnnnnnnnnnnnnnnnnnnnnnnnnnnnnnnnnnnnnnnnnnnnnnnnnnnnnnnnnnnnnnnnnnnnnnnnnnnnnnnnnnnnnnnnnnnnnnnnnnnnnnnnnnnnnnnnnnnnnnnnnnnnnnnnnnnnnnnnnnnnnnnnnnnnnnnnnnnnnnnnnnnnnnnnnnnnnnnnnnnnnnnnnnnnnnnnnnnnnnnnnnnnnnnnnnnnnnnnnnnnnnnnnnnnnnnnnnnnnnnnnnnnnnnnnnnnnnnnnnnnnnnnnnnnnnnnnnnnnnnnnnnnnnnnnnnnnnnnnnnnnnnnnnnnnnnnnnnnnnnnnnnnnnnnnnnnnnnnnnnnnnnnnnnnnnnnnnnnnnnnnnnnnnnnnnnnnnnnnnnnnnnnnnnnnnnnnnnnnnnnnnnnnnnnnnnnnnnnnnnnnnnnnnnnnnnnnnnnnnnnnnnnnnnnnnnnnnnnnnnnnnnnnnnnnnnnnnnnnnnnnnnnnnnnnnnnnnnnnnnnnnnnnnnnnnnnnnnnnnnnnnnnnnnnnnnnnnnnnnnnnnnnnnnnnnnnnnnnnnnnnnnnnnnnnnnnnnnnnnnnnnnnnnnnnnnnnnnnnnnnnnnnnnnnnnnnnnnnnnnnnnnnnnnnnnnnnnnnnnnnnnnnnnnnnnnnnnnnnnnnnnnnnnnnnnnnnnnnnnnnnnnnnnnnnnnnnnnnnnnnnnnnnnnnnnnnnnnnnnnnnnnnnnnnnnnnnnnnnnnnnnnnnnnnnnnnnnnnnnnnnnnnnnnnnnnnnnnnnnnnnnnnnnnnnnnnnnnnnnnnnnnnnnnnnnnnnnnnnnnnnnnnnnnnnnnnnnnnnnnnnnnnnnnnnnnnnnnnnnnnnnnnnnnnnnnnnnnnnnnnnnnnnnnnnnnnnnnnnnnnnnnnnnnnnnnnnnnnnnnnnnnnnnnnnnnnnnnnnnnnnnnnnnnnnnnnnnnnnnnnnnnnnnnnnnnnnnnnnnnnnnnnnnnnnnnnnnnnnnnnnnnnnnnnnnnnnnnnnnnnnnnnnnnnnnnnnnnnnnnnnnnnnnnnnnnnnnnnnnnnnnnnnnnnnnnnnnnnnnnnnnnnnnnnnnnnnnnnnnnnnnnnnnnnnnnnnnnnnnnnnnnnnnnnnnnnnnnnnnnnnnnnnnnnnnnnnnnnnnnnnnnnnnnnnnnnnnnnnnnnnnnnnnnnnnnnnnnnnnnnnnnnnnnnnnnnnnnnnnnnnnnnnnnnnnnnnnnnnnnnnnnnnnnnnnnnnnnnnnnnnnnnnnnnnnnnnnnnnnnnnnnnnnnnnnnnnnnnnnnnnnnnnnnnnnnnnnnnnnnnnnnnnnnnnnnnnnnnnnnnnnnnnnnnnnnnnnnnnnnnnnnnnnnnnnnnnnnnnnnnnnnnnnnnnnnnnnnnnnnnnnnnnnnnnnnnnnnnnnnnnnnnnnnnnnnnnnnnnnnnnnnnnnnnnnnnnnnnnnnnnnnnnnnnnnnnnnnnnnnnnnnnnnnnnnnnnnnnnnnnnnnnnnnnnnnnnnnnnnnnnnnnnnnnnnnnnnnnnnnnnnnnnnnnnnnnnnnnnnnnnnnnnnnnnnnnnnnnnnnnnnnnnnnnnnnnnnnnnnnnnnnnnnnnnnnnnnnnnnnnnnnnnnnnnnnnnnnnnnnnnnnnnnnnnnnnnnnnnnnnnnnnnnnnnnnnnnnnnnnnnnnnnnnnnnnnnnnnnnnnnnnnnnnnnnnnnnnnnnnnnnnnnnnnnnnnnnnnnnnnnnnnnnnnnnnnnnnnnnnnnnnnnnnnnnnnnnnnnnnnnnnnnnnnnnnnnnnnnnnnnnnnnnnnnnnnnnnnnnnnnnnnnnnnnnnnnnnnnnnnnnnnnnnnnnnnnnnnnnnnnnnnnnnnnnnnnnnnnnnnnnnnnnnnnnnnnnnnnnnnnnnnnnnnnnnnnnnnnnnnnnnnnnnnnnnnnnnnnnnnnnnnnnnnnnnnnnnnnnnnnnnnnnnnnnnnnnnnnnnnnnnnnnnnnnnnnnnnnnnnnnnnnnnnnnnnnnnnnnnnnnnnnnnnnnnnnnnnnnnnnnnnnnnnnnnnnnnnnnnnnnnnnnnnnnnnnnnnnnnnnnnnnnnnnnnnnnnnnnnnnnnnnnnnnnnnnnnnnnnnnnnnnnnnnnnnnnnnnnnnnnnnnnnnnnnnnnnnnnnnnnnnnnnnnnnnnnnnnnnnnnnnnnnnnnnnnnnnnnnnnnnnnnnnnnnnnnnnnnnnnnnnnnnnnnnnnnnnnnnnnnnnnnnnnnnnnnnnnnnnnnnnnnnnnnnnnnnnnnnnnnnnnnnnnnnnnnnnnnnnnnnnnnnnnnnnnnnnnnnnnnnnnnnnnnnnnnnnnnnnnnnnnnnnnnnnnnnnnnnnnnnnnnnnnnnnnnnnnnnnnnnnnnnnnnnnnnnnnnnnnnnnnnnnnnnnnnnnnnnnnnnnnnnnnnnnnnnnnnnnnnnnnnnnnnnnnnnnnnnnnnnnnnnnnnnnnnnnnnnnnnnnnnnnnnnnnnnnnnnnnnnnnnnnnnnnnnnnnnnnnnnnnnnnnnnnnnnnnnnnnnnnnnnnnnnnnnnnnnnnnnnnnnnnnnnnnnnnnnnnnnnnnnnnnnnnnnnnnnnnnnnnnnnnnnnnnnnnnnnnnnnnnnnnnnnnnnnnnnnnnnnnnnnnnnnnnnnnnnnnnnnnnnnnnnnnnnnnnnnnnnnnnnnnnnnnnnnnnnnnnnnnnnnnnnnnnnnnnnnnnnnnnnnnnnnnnnnnnnnnnnnnnnnnnnnnnnnnnnnnnnnnnnnnnnnnnnnnnnnnnnnnnnnnnnnnnnnnnnnnnnnnnnnnnnnnnnnnnnnnnnnnnnnnnnnnnnnnnnnnnnnnnnnnnnnnnnnnnnnnnnnnnnnnnnnnnnnnnnnnnnnnnnnnnnnnnnnnnnnnnnnnnnnnnnnnnnnnnnnnnnnnnnnnnnnnnnnnnnnnnnnnnnnnnnnnnnnnnnnnnnnnnnnnnnnnnnnnnnnnnnnnnnnnnnnnnnnnnnnnnnnnnnnnnnnnnnnnnnnnnnnnnnnnnnnnnnnnnnnnnnnnnnnnnnnnnnnnnnnnnnnnnnnnnnnnnnnnnnnnnnnnnnnnnnnnnnnnnnnnnnnnnnnnnnnnnnnnnnnnnnnnnnnnnnnnnnnnnnnnnnnnnnnnnnnnnnnnnnnnnnnnnnnnnnnnnnnnnnnnnnnnnnnnnnnnnnnnnnnnnnnnnnnnnnnnnnnnnnnnnnnnnnnnnnnnnnnnnnnnnnnnnnnnnnnnnnnnnnnnnnnnnnnnnnnnnnnnnnnnnnnnnnnnnnnnnnnnnnnnnnnnnnnnnnnnnnnnnnnnnnnnnnnnnnnnnnnnnnnnnnnnnnnnnnnnnnnnnnnnnnnnnnnnnnnnnnnnnnnnnnnnnnnnnnnnnnnnnnnnnnnnnnnnnnnnnnnnnnnnnnnnnnnnnnnnnnnnnnnnnnnnnnnnnnnnnnnnnnnnnnnnnnnnnnnnnnnnnnnnnnnnnnnnnnnnnnnnnnnnnnnnnnnnnnnnnnnnnnnnnnnnnnnnnnnnnnnnnnnnnnnnnnnnnnnnnnnnnnnnnnnnnnnnnnnnnnnnnnnnnnnnnnnnnnnnnnnnnnnnnnnnnnnnnnnnnnnnnnnnnnnnnnnnnnnnnnnnnnnnnnnnnnnnnnnnnnnnnnnnnnnnnnnnnnnnnnnnnnnnnnnnnnnnnnnnnnnnnnnnnnnnnnnnnnnnnnnnnnnnnnnnnnnnnnnnnnnnnnnnnnnnnnnnnnnnnnnnnnnnnnnnnnnnnnnnnnnnnnnnnnnnnnnnnnnnnnnnnnnnnnnnnnnnnnnnnnnnnnnnnnnnnnnnnnnnnnnnnnnnnnnnnnnnnnnnnnnnnnnnnnnnnnnnnnnnnnnnnnnnnnnnnnnnnnnnnnnnnnnnnnnnnnnnnnnnnnnnnnnnnnnnnnnnnnnnnnnnnnnnnnnnnnnnnnnnnnnnnnnnnnnnnnnnnnnnnnnnnnnnnnnnnnnnnnnnnnnnnnnnnnnnnnnnnnnnnnnnnnnnnnnnnnnnnnnnnnnnnnnnnnnnnnnnnnnnnnnnnnnnnnnnnnnnnnnnnnnnnnnnnnnnnnnnnnnnnnnnnnnnnnnnnnnnnnnnnnnnnnnnnnnnnnnnnnnnnnnnnnnnnnnnnnnnnnnnnnnnnnnnnnnnnnnnnnnnnnnnnnnnnnnnnnnnnnnnnnnnnnnnnnnnnnnnnnnnnnnnnnnnnnnnnnnnnnnnnnnnnnnnnnnnnnnnnnnnnnnnnnnnnnnnnnnnnnnnnnnnnnnnnnnnnnnnnnnnnnnnnnnnnnnnnnnnnnnnnnnnnnnnnnnnnnnnnnnnnnnnnnnnnnnnnnnnnnnnnnnnnnnnnnnnnnnnnnnnnnnnnnnnnnnnnnnnnnnnnnnnnnnnnnnnnnnnnnnnnnnnnnnnnnnnnnnnnnnnnnnnnnnnnnnnnnnnnnnnnnnnnnnnnnnnnnnnnnnnnnnnnnnnnnnnnnnnnnnnnnnnnnnnnnnnnnnnnnnnnnnnnnnnnnnnnnnnnnnnnnnnnnnnnnnnnnnnnnnnnnnnnnnnnnnnnnnnnnnnnnnnnnnnnnnnnnnnnnnnnnnnnnnnnnnnnnnnnnnnnnnnnnnnnnnnnnnnnnnnnnnnnnnnnnnnnnnnnnnnnnnnnnnnnnnnnnnnnnnnnnnnnnnnnnnnnnnnnnnnnnnnnnnnnnnnnnnnnnnnnnnnnnnnnnnnnnnnnnnnnnnnnnnnnnnnnnnnnnnnnnnnnnnnnnnnnnnnnnnnnnnnnnnnnnnnnnnnnnnnnnnnnnnnnnnnnnnnnnnnnnnnnnnnnnnnnnnnnnnnnnnnnnnnnnnnnnnnnnnnnnnnnnnnnnnnnnnnnnnnnnnnnnnnnnnnnnnnnnnnnnnnnnnnnnnnnnnnnnnnnnnnnnnnnnnnnnnnnnnnnnnnnnnnnnnnnnnnnnnnnnnnnnnnnnnnnnnnnnnnnnnnnnnnnnnnnnnnnnnnnnnnnnnnnnnnnnnnnnnnnnnnnnnnnnnnnnnnnnnnnnnnnnnnnnnnnnnnnnnnnnnnnnnnnnnnnnnnnnnnnnnnnnnnnnnnnnnnnnnnnnnnnnnnnnnnnnnnnnnnnnnnnnnnnnnnnnnnnnnnnnnnnnnnnnnnnnnnnnnnnnnnnnnnnnnnnnnnnnnnnnnnnnnnnnnnnnnnnnnnnnnnnnnnnnnnnnnnnnnnnnnnnnnnnnnnnnnnnnnnnnnnnnnnnnnnnnnnnnnnnnnnnnnnnnnnnnnnnnnnnnnnnnnnnnnnnnnnnnnnnnnnnnnnnnnnnnnnnnnnnnnnnnnnnnnnnnnnnnnnnnnnnnnnnnnnnnnnnnnnnnnnnnnnnnnnnnnnnnnnnnnnnnnnnnnnnnnnnnnnnnnnnnnnnnnnnnnnnnnnnnnnnnnnnnnnnnnnnnnnnnnnnnnnnnnnnnnnnnnnnnnnnnnnnnnnnnnnnnnnnnnnnnnnnnnnnnnnnnnnnnnnnnnnnnnnnnnnnnnnnnnnnnnnnnnnnnnnnnnnnnnnnnnnnnnnnnnnnnnnnnnnnnnnnnnnnnnnnnnnnnnnnnnnnnnnnnnnnnnnnnnnnnnnnnnnnnnnnnnnnnnnnnnnnnnnnnnnnnnnnnnnnnnnnnnnnnnnnnnnnnnnnnnnnnnnnnnnnnnnnnnnnnnnnnnnnnnnnnnnnnnnnnnnnnnnnnnnnnnnnnnnnnnnnnnnnnnnnnnnnnnnnnnnnnnnnnnnnnnnnnnnnnnnnnnnnnnnnnnnnnnnnnnnnnnnnnnnnnnnnnnnnnnnnnnnnnnnnnnnnnnnnnnnnnnnnnnnnnnnnnnnnnnnnnnnnnnnnnnnnnnnnnnnnnnnnnnnnnnnnnnnnnnnnnnnnnnnnnnnnnnnnnnnnnnnnnnnnnnnnnnnnnnnnnnnnnnnnnnnnnnnnnnnnnnnnnnnnnnnnnnnnnnnnnnnnnnnnnnnnnnnnnnnnnnnnnnnnnnnnnnnnnnnnnnnnnnnnnnnnnnnnnnnnnnnnnnnnnnnnnnnnnnnnnnnnnnnnnnnnnnnnnnnnnnnnnnnnnnnnnnnnnnnnnnnnnnnnnnnnnnnnnnnnnnnnnnnnnnnnnnnnnnnnnnnnnnnnnnnnnnnnnnnnnnnnnnnnnnnnnnnnnnnnnnnnnnnnnnnnnnnnnnnnnnnnnnnnnnnnnnnnnnnnnnnnnnnnnnnnnnnnnnnnnnnnnnnnnnnnnnnnnnnnnnnnnnnnnnnnnnnnnnnnnnnnnnnnnnnnnnnnnnnnnnnnnnnnnnnnnnnnnnnnnnnnnnnnnnnnnnnnnnnnnnnnnnnnnnnnnnnnnnnnnnnnnnnnnnnnnnnnnnnnnnnnnnnnnnnnnnnnnnnnnnnnnnnnnnnnnnnnnnnnnnnnnnnnnnnnnnnnnnnnnnnnnnnnnnnnnnnnnnnnnnnnnnnnnnnnnnnnnnnnnnnnnnnnnnnnnnnnnnnnnnnnnnnnnnnnnnnnnnnnnnnnnnnnnnnnnnnnnnnnnnnnnnnnnnnnnnnnnnnnnnnnnnnnnnnnnnnnnnnnnnnnnnnnnnnnnnnnnnnnnnnnnnnnnnnnnnnnnnnnnnnnnnnnnnnnnnnnnnnnnnnnnnnnnnnnnnnnnnnnnnnnnnnnnnnnnnnnnnnnnnnnnnnnnnnnnnnnnnnnnnnnnnnnnnnnnnnnnnnnnnnnnnnnnnnnnnnnnnnnnnnnnnnnnnnnnnnnnnnnnnnnnnnnnnnnnnnnnnnnnnnnnnnnnnnnnnnnnnnnnnnnnnnnnnnnnnnnnnnnnnnnnnnnnnnnnnnnnnnnnnnnnnnnnnnnnnnnnnnnnnnnnnnnnnnnnnnnnnnnnnnnnnnnnnnnnnnnnnnnnnnnnnnnnnnnnnnnnnnnnnnnnnnnnnnnnnnnnnnnnnnnnnnnnnnnnnnnnnnnnnnnnnnnnnnnnnnnnnnnnnnnnnnnnnnnnnnnnnnnnnnnnnnnnnnnnnnnnnnnnnnnnnnnnnnnnnnnnnnnnnnnnnnnnnnnnnnnnnnnnnnnnnnnnnnnnnnnnnnnnnnnnnnnnnnnnnnnnnnnnnnnnnnnnnnnnnnnnnnnnnnnnnnnnnnnnnnnnnnnnnnnnnnnnnnnnnnnnnnnnnnnnnnnnnnnnnnnnnnnnnnnnnnnnnnnnnnnnnnnnnnnnnnnnnnnnnnnnnnnnnnnnnnnnnnnnnnnnnnnnnnnnnnnnnnnnnnnnnnnnnnnnnnnnnnnnnnnnnnnnnnnnnnnnnnnnnnnnnnnnnnnnnnnnnnnnnnnnnnnnnnnnnnnnnnnnnnnnnnnnnnnnnnnnnnnnnnnnnnnnnnnnnnnnnnnnnnnnnnnnnnnnnnnnnnnnnnnnnnnnnnnnnnnnnnnnnnnnnnnnnnnnnnnnnnnnnnnnnnnnnnnnnnnnnnnnnnnnnnnnnnnnnnnnnnnnnnnnnnnnnnnnnnnnnnnnnnnnnnnnnnnnnnnnnnnnnnnnnnnnnnnnnnnnnnnnnnnnnnnnnnnnnnnnnnnnnnnnnnnnnnnnnnnnnnnnnnnnnnnnnnnnnnnnnnnnnnnnnnnnnnnnnnnnnnnnnnnnnnnnnnnnnnnnnnnnnnnnnnnnnnnnnnnnnnnnnnnnnnnnnnnnnnnnnnnnnnnnnnnnnnnnnnnnnnnnnnnnnnnnnnnnnnnnnnnnnnnnnnnnnnnnnnnnnnnnnnnnnnnnnnnnnnnnnnnnnnnnnnnnnnnnnnnnnnnnnnnnnnnnnnnnnnnnnnnnnnnnnnnnnnnnnnnnnnnnnnnnnnnnnnnnnnnnnnnnnnnnnnnnnnnnnnnnnnnnnnnnnnnnnnnnnnnnnnnnnnnnnnnnnnnnnnnnnnnnnnnnnnnnnnnnnnnnnnnnnnnnnnnnnnnnnnnnnnnnnnnnnnnnnnnnnnnnnnnnnnnnnnnnnnnnnnnnnnnnnnnnnnnnnnnnnnnnnnnnnnnnnnnnnnnnnnnnnnnnnnnnnnnnnnnnnnnnnnnnnnnnnnnnnnnnnnnnnnnnnnnnnnnnnnnnnnnnnnnnnnnnnnnnnnnnnnnnnnnnnnnnnnnnnnnnnnnnnnnnnnnnnnnnnnnnnnnnnnnnnnnnnnnnnnnnnnnnnnnnnnnnnnnnnnnnnnnnnnnnnnnnnnnnnnnnnnnnnnnnnnnnnnnnnnnnnnnnnnnnnnnnnnnnnnnnnnnnnnnnnnnnnnnnnnnnnnnnnnnnnnnnnnnnnnnnnnnnnnnnnnnnnnnnnnnnnnnnnnnnnnnnnnnnnnnnnnnnnnnnnnnnnnnnnnnnnnnnnnnnnnnnnnnnnnnnnnnnnnnnnnnnnnnnnnnnnnnnnnnnnnnnnnnnnnnnnnnnnnnnnnnnnnnnnnnnnnnnnnnnnnnnnnnnnnnnnnnnnnnnnnnnnnnnnnnnnnnnnnnnnnnnnnnnnnnnnnnnnnnnnnnnnnnnnnnnnnnnnnnnnnnnnnnnnnnnnnnnnnnnnnnnnnnnnnnnnnnnnnnnnnnnnnnnnnnnnnnnnnnnnnnnnnnnnnnnnnnnnnnnnnnnnnnnnnnnnnnnnnnnnnnnnnnnnnnnnnnnnnnnnnnnnnnnnnnnnnnnnnnnnnnnnnnnnnnnnnnnnnnnnnnnnnnnnnnnnnnnnnnnnnnnnnnnnnnnnnnnnnnnnnnnnnnnnnnnnnnnnnnnnnnnnnnnnnnnnnnnnnnnnnnnnnnnnnnnnnnnnnnnnnnnnnnnnnnnnnnnnnnnnnnnnnnnnnnnnnnnnnnnnnnnnnnnnnnnnnnnnnnnnnnnnnnnnnnnnnnnnnnnnnnnnnnnnnnnnnnnnnnnnnnnnnnnnnnnnnnnnnnnnnnnnnnnnnnnnnnnnnnnnnnnnnnnnnnnnnnnnnnnnnnnnnnnnnnnnnnnnnnnnnnnnnnnnnnnnnnnnnnnnnnnnnnnnnnnnnnnnnnnnnnnnnnnnnnnnnnnnnnnnnnnnnnnnnnnnnnnnnnnnnnnnnnnnnnnnnnnnnnnnnnnnnnnnnnnnnnnnnnnnnnnnnnnnnnnnnnnnnnnnnnnnnnnnnnnnnnnnnnnnnnnnnnnnnnnnnnnnnnnnnnnnnnnnnnnnnnnnnnnnnnnnnnnnnnnnnnnnnnnnnnnnnnnnnnnnnnnnnnnnnnnnnnnnnnnnnnnnnnnnnnnnnnnnnnnnnnnnnnnnnnnnnnnnnnnnnnnnnnnnnnnnnnnnnnnnnnnnnnnnnnnnnnnnnnnnnnnnnnnnnnnnnnnnnnnnnnnnnnnnnnnnnnnnnnnnnnnnnnnnnnnnnnnnnnnnnnnnnnnnnnnnnnnnnnnnnnnnnnnnnnnnnnnnnnnnnnnnnnnnnnnnnnnnnnnnnnnnnnnnnnnnnnnnnnnnnnnnnnnnnnnnnnnnnnnnnnnnnnnnnnnnnnnnnnnnnnnnnnnnnnnnnnnnnnnnnnnnnnnnnnnnnnnnnnnnnnnnnnnnnnnnnnnnnnnnnnnnnnnnnnnnnnnnnnnnnnnnnnnnnnnnnnnnnnnnnnnnnnnnnnnnnnnnnnnnnnnnnnnnnnnnnnnnnnnnnnnnnnnnnnnnnnnnnnnnnnnnnnnnnnnnnnnnnnnnnnnnnnnnnnnnnnnnnnnnnnnnnnnnnnnnnnnnnnnnnnnnnnnnnnnnnnnnnnnnnnnnnnnnnnnnnnnnnnnnnnnnnnnnnnnnnnnnnnnnnnnnnnnnnnnnnnnnnnnnnnnnnnnnnnnnnnnnnnnnnnnnnnnnnnnnnnnnnnnnnnnnnnnnnnnnnnnnnnnnnnnnnnnnnnnnnnnnnnnnnnnnnnnnnnnnnnnnnnnnnnnnnnnnnnnnnnnnnnnnnnnnnnnnnnnnnnnnnnnnnnnnnnnnnnnnnnnnnnnnnnnnnnnnnnnnnnnnnnnnnnnnnnnnnnnnnnnnnnnnnnnnnnnnnnnnnnnnnnnnnnnnnnnnnnnnnnnnnnnnnnnnnnnnnnnnnnnnnnnnnnnnnnnnnnnnnnnnnnnnnnnnnnnnnnnnnnnnnnnnnnnnnnnnnnnnnnnnnnnnnnnnnnnnnnnnnnnnnnnnnnnnnnnnnnnnnnnnnnnnnnnnnnnnnnnnnnnnnnnnnnnnnnnnnnnnnnnnnnnnnnnnnnnnnnnnnnnnnnnnnnnnnnnnnnnnnnnnnnnnnnnnnnnnnnnnnnnnnnnnnnnnnnnnnnnnnnnnnnnnnnnnnnnnnnnnnnnnnnnnnnnnnnnnnnnnnnnnnnnnnnnnnnnnnnnnnnnnnnnnnnnnnnnnnnnnnnnnnnnnnnnnnnnnnnnnnnnnnnnnnnnnnnnnnnnnnnnnnnnnnnnnnnnnnnnnnnnnnnnnnnnnnnnnnnnnnnnnnnnnnnnnnnnnnnnnnnnnnnnnnnnnnnnnnnnnnnnnnnnnnnnnnnnnnnnnnnnnnnnnnnnnnnnnnnnnnnnnnnnnnnnnnnnnnnnnnnnnnnnnnnnnnnnnnnnnnnnnnnnnnnnnnnnnnnnnnnnnnnnnnnnnnnnnnnnnnnnnnnnnnnnnnnnnnnnnnnnnnnnnnnnnnnnnnnnnnnnnnnnnnnnnnnnnnnnnnnnnnnnnnnnnnnnnnnnnnnnnnnnnnnnnnnnnnnnnnnnnnnnnnnnnnnnnnnnnnnnnnnnnnnnnnnnnnnnnnnnnnnnnnnnnnnnnnnnnnnnnnnnnnnnnnnnnnnnnnnnnnnnnnnnnnnnnnnnnnnnnnnnnnnnnnnnnnnnnnnnnnnnnnnnnnnnnnnnnnnnnnnnnnnnnnnnnnnnnnnnnnnnnnnnnnnnnnnnnnnnnnnnnnnnnnnnnnnnnnnnnnnnnnnnnnnnnnnnnnnnnnnnnnnnnnnnnnnnnnnnnnnnnnnnnnnnnnnnnnnnnnnnnnnnnnnnnnnnnnnnnnnnnnnnnnnnnnnnnnnnnnnnnnnnnnnnnnnnnnnnnnnnnnnnnnnnnnnnnnnnnnnnnnnnnnnnnnnnnnnnnnnnnnnnnnnnnnnnnnnnnnnnnnnnnnnnnnnnnnnnnnnnnnnnnnnnnnnnnnnnnnnnnnnnnnnnnnnnnnnnnnnnnnnnnnnnnnnnnnnnnnnnnnnnnnnnnnnnnnnnnnnnnnnnnnnnnnnnnnnnnnnnnnnnnnnnnnnnnnnnnnnnnnnnnnnnnnnnnnnnnnnnnnnnnnnnnnnnnnnnnnnnnnnnnnnnnnnnnnnnnnnnnnnnnnnnnnnnnnnnnnnnnnnnnnnnnnnnnnnnnnnnnnnnnnnnnnnnnnnnnnnnnnnnnnnnnnnnnnnnnnnnnnnnnnnnnnnnnnnnnnnnnnnnnnnnnnnnnnnnnnnnnnnnnnnnnnnnnnnnnnnnnnnnnnnnnnnnnnnnnnnnnnnnnnnnnnnnnnnnnnnnnnnnnnnnnnnnnnnnnnnnnnnnnnnnnnnnnnnnnnnnnnnnnnnnnnnnnnnnnnnnnnnnnnnnnnnnnnnnnnnnnnnnnnnnnnnnnnnnnnnnnnnnnnnnnnnnnnnnnnnnnnnnnnnnnnnnnnnnnnnnnnnnnnnnnnnnnnnnnnnnnnnnnnnnnnnnnnnnnnnnnnnnnnnnnnnnnnnnnnnnnnnnnnnnnnnnnnnnnnnnnnnnnnnnnnnnnnnnnnnnnnnnnnnnnnnnnnnnnnnnnnnnnnnnnnnnnnnnnnnnnnnnnnnnnnnnnnnnnnnnnnnnnnnnnnnnnnnnnnnnnnnnnnnnnnnnnnnnnnnnnnnnnnnnnnnnnnnnnnnnnnnnnnnnnnnnnnnnnnnnnnnnnnnnnnnnnnnnnnnnnnnnnnnnnnnnnnnnnnnnnnnnnnnnnnnnnnnnnnnnnnnnnnnnnnnnnnnnnnnnnnnnnnnnnnnnnnnnnnnnnnnnnnnnnnnnnnnnnnnnnnnnnnnnnnnnnnnnnnnnnnnnnnnnnnnnnnnnnnnnnnnnnnnnnnnnnnnnnnnnnnnnnnnnnnnnnnnnnnnnnnnnnnnnnnnnnnnnnnnnnnnnnnnnnnnnnnnnnnnnnnnnnnnnnnnnnnnnnnnnnnnnnnnnnnnnnnnnnnnnnnnnnnnnnnnnnnnnnnnnnnnnnnnnnnnnnnnnnnnnnnnnnnnnnnnnnnnnnnnnnnnnnnnnnnnnnnnnnnnnnnnnnnnnnnnnnnnnnnnnnnnnnnnnnnnnnnnnnnnnnnnnnnnnnnnnnnnnnnnnnnnnnnnnnnnnnnnnnnnnnnnnnnnnnnnnnnnnnnnnnnnnnnnnnnnnnnnnnnnnnnnnnnnnnnnnnnnnnnnnnnnnnnnnnnnnnnnnnnnnnnnnnnnnnnnnnnnnnnnnnnnnnnnnnnnnnnnnnnnnnnnnnnnnnnnnnnnnnnnnnnnnnnnnnnnnnnnnnnnnnnnnnnnnnnnnnnnnnnnnnnnnnnnnnnnnnnnnnnnnnnnnnnnnnnnnnnnnnnnnnnnnnnnnnnnnnnnnnnnnnnnnnnnnnnnnnnnnnnnnnnnnnnnnnnnnnnnnnnnnnnnnnnnnnnnnnnnnnnnnnnnnnnnnnnnnnnnnnnnnnnnnnnnnnnnnnnnnnnnnnnnnnnnnnnnnnnnnnnnnnnnnnnnnnnnnnnnnnnnnnnnnnnnnnnnnnnnnnnnnnnnnnnnnnnnnnnnnnnnnnnnnnnnnnnnnnnnnnnnnnnnnnnnnnnnnnnnnnnnnnnnnnnnnnnnnnnnnnnnnnnnnnnnnnnnnnnnnnnnnnnnnnnnnnnnnnnnnnnnnnnnnnnnnnnnnnnnnnnnnnnnnnnnnnnnnnnnnnnnnnnnnnnnnnnnnnnnnnnnnnnnnnnnnnnnnnnnnnnnnnnnnnnnnnnnnnnnnnnnnnnnnnnnnnnnnnnnnnnnnnnnnnnnnnnnnnnnnnnnnnnnnnnnnnnnnnnnnnnnnnnnnnnnnnnnnnnnnnnnnnnnnnnnnnnnnnnnnnnnnnnnnnnnnnnnnnnnnnnnnnnnnnnnnnnnnnnnnnnnnnnnnnnnnnnnnnnnnnnnnnnnnnnnnnnnnnnnnnnnnnnnnnnnnnnnnnnnnnnnnnnnnnnnnnnnnnnnnnnnnnnnnnnnnnnnnnnnnnnnnnnnnnnnnnnnnnnnnnnnnnnnnnnnnnnnnnnnnnnnnnnnnnnnnnnnnnnnnnnnnnnnnnnnnnnnnnnnnnnnnnnnnnnnnnnnnnnnnnnnnnnnnnnnnnnnnnnnnnnnnnnnnnnnnnnnnnnnnnnnnnnnnnnnnnnnnnnnnnnnnnnnnnnnnnnnnnnnnnnnnnnnnnnnnnnnnnnnnnnnnnnnnnnnnnnnnnnnnnnnnnnnnnnnnnnnnnnnnnnnnnnnnnnnnnnnnnnnnnnnnnnnnnnnnnnnnnnnnnnnnnnnnnnnnnnnnnnnnnnnnnnnnnnnnnnnnnnnnnnnnnnnnnnnnnnnnnnnnnnnnnnnnnnnnnnnnnnnnnnnnnnnnnnnnnnnnnnnnnnnnnnnnnnnnnnnnnnnnnnnnnnnnnnnnnnnnnnnnnnnnnnnnnnnnnnnnnnnnnnnnnnnnnnnnnnnnnnnnnnnnnnnnnnnnnnnnnnnnnnnnnnnnnnnnnnnnnnnnnnnnnnnnnnnnnnnnnnnnnnnnnnnnnnnnnnnnnnnnnnnnnnnnnnnnnnnnnnnnnnnnnnnnnnnnnnnnnnnnnnnnnnnnnnnnnnnnnnnnnnnnnnnnnnnnnnnnnnnnnnnnnnnnnnnnnnnnnnnnnnnnnnnnnnnnnnnnnnnnnnnnnnnnnnnnnnnnnnnnnnnnnnnnnnnnnnnnnnnnnnnnnnnnnnnnnnnnnnnnnnnnnnnnnnnnnnnnnnnnnnnnnnnnnnnnnnnnnnnnnnnnnnnnnnnnnnnnnnnnnnnnnnnnnnnnnnnnnnnnnnnnnnnnnnnnnnnnnnnnnnnnnnnnnnnnnnnnnnnnnnnnnnnnnnnnnnnnnnnnnnnnnnnnnnnnnnnnnnnnnnnnnnnnnnnnnnnnnnnnnnnnnnnnnnnnnnnnnnnnnnnnnnnnnnnnnnnnnnnnnnnnnnnnnnnnnnnnnnnnnnnnnnnnnnnnnnnnnnnnnnnnnnnnnnnnnnnnnnnnnnnnnnnnnnnnnnnnnnnnnnnnnnnnnnnnnnnnnnnnnnnnnnnnnnnnnnnnnnnnnnnnnnnnnnnnnnnnnnnnnnnnnnnnnnnnnnnnnnnnnnnnnnnnnnnnnnnnnnnnnnnnnnnnnnnnnnnnnnnnnnnnnnnnnnnnnnnnnnnnnnnnnnnnnnnnnnnnnnnnnnnnnnnnnnnnnnnnnnnnnnnnnnnnnnnnnnnnnnnnnnnnnnnnnnnnnnnnnnnnnnnnnnnnnnnnnnnnnnnnnnnnnnnnnnnnnnnnnnnnnnnnnnnnnnnnnnnnnnnnnnnnnnnnnnnnnnnnnnnnnnnnnnnnnnnnnnnnnnnnnnnnnnnnnnnnnnnnnnnnnnnnnnnnnnnnnnnnnnnnnnnnnnnnnnnnnnnnnnnnnnnnnnnnnnnnnnnnnnnnnnnnnnnnnnnnnnnnnnnnnnnnnnnnnnnnnnnnnnnnnnnnnnnnnnnnnnnnnnnnnnnnnnnnnnnnnnnnnnnnnnnnnnnnnnnnnnnnnnnnnnnnnnnnnnnnnnnnnnnnnnnnnnnnnnnnnnnnnnnnnnnnnnnnnnnnnnnnnnnnnnnnnnnnnnnnnnnnnnnnnnnnnnnnnnnnnnnnnnnnnnnnnnnnnnnnnnnnnnnnnnnnnnnnnnnnnnnnnnnnnnnnnnnnnnnnnnnnnnnnnnnnnnnnnnnnnnnnnnnnnnnnnnnnnnnnnnnnnnnnnnnnnnnnnnnnnnnnnnnnnnnnnnnnnnnnnnnnnnnnnnnnnnnnnnnnnnnnnnnnnnnnnnnnnnnnnnnnnnnnnnnnnnnnnnnnnnnnnnnnnnnnnnnnnnnnnnnnnnnnnnnnnnnnnnnnnnnnnnnnnnnnnnnnnnnnnnnnnnnnnnnnnnnnnnnnnnnnnnnnnnnnnnnnnnnnnnnnnnnnnnnnnnnnnnnnnnnnnnnnnnnnnnnnnnnnnnnnnnnnnnnnnnnnnnnnnnnnnnnnnnnnnnnnnnnnnnnnnnnnnnnnnnnnnnnnnnnnnnnnnnnnnnnnnnnnnnnnnnnnnnnnnnnnnnnnnnnnnnnnnnnnnnnnnnnnnnnnnnnnnnnnnnnnnnnnnnnnnnnnnnnnnnnnnnnnnnnnnnnnnnnnnnnnnnnnnnnnnnnnnnnnnnnnnnnnnnnnnnnnnnnnnnnnnnnnnnnnnnnnnnnnnnnnnnnnnnnnnnnnnnnnnnnnnnnnnnnnnnnnnnnnnnnnnnnnnnnnnnnnnnnnnnnnnnnnnnnnnnnnnnnnnnnnnnnnnnnnnnnnnnnnnnnnnnnnnnnnnnnnnnnnnnnnnnnnnnnnnnnnnnnnnnnnnnnnnnnnnnnnnnnnnnnnnnnnnnnnnnnnnnnnnnnnnnnnnnnnnnnnnnnnnnnnnnnnnnnnnnnnnnnnnnnnnnnnnnnnnnnnnnnnnnnnnnnnnnnnnnnnnnnnnnnnnnnnnnnnnnnnnnnnnnnnnnnnnnnnnnnnnnnnnnnnnnnnnnnnnnnnnnnnnnnnnnnnnnnnnnnnnnnnnnnnnnnnnnnnnnnnnnnnnnnnnnnnnnnnnnnnnnnnnnnnnnnnnnnnnnnnnnnnnnnnnnnnnnnnnnnnnnnnnnnnnnnnnnnnnnnnnnnnnnnnnnnnnnnnnnnnnnnnnnnnnnnnnnnnnnnnnnnnnnnnnnnnnnnnnnnnnnnnnnnnnnnnnnnnnnnnnnnnnnnnnnnnnnnnnnnnnnnnnnnnnnnnnnnnnnnnnnnnnnnnnnnnnnnnnnnnnnnnnnnnnnnnnnnnnnnnnnnnnnnnnnnnnnnnnnnnnnnnnnnnnnnnnnnnnnnnnnnnnnnnnnnnnnnnnnnnnnnnnnnnnnnnnnnnnnnnnnnnnnnnnnnnnnnnnnnnnnnnnnnnnnnnnnnnnnnnnnnnnnnnnnnnnnnnnnnnnnnnnnnnnnnnnnnnnnnnnnnnnnnnnnnnnnnnnnnnnnnnnnnnnnnnnnnnnnnnnnnnnnnnnnnnnnnnnnnnnnnnnnnnnnnnnnnnnnnnnnnnnnnnnnnnnnnnnnnnnnnnnnnnnnnnnnnnnnnnnnnnnnnnnnnnnnnnnnnnnnnnnnnnnnnnnnnnnnnnnnnnnnnnnnnnnnnnnnnnnnnnnnnnnnnnnnnnnnnnnnnnnnnnnnnnnnnnnnnnnnnnnnnnnnnnnnnnnnnnnnnnnnnnnnnnnnnnnnnnnnnnnnnnnnnnnnnnnnnnnnnnnnnnnnnnnnnnnnnnnnnnnnnnnnnnnnnnnnnnnnnnnnnnnnnnnnnnnnnnnnnnnnnnnnnnnnnnnnnnnnnnnnnnnnnnnnnnnnnnnnnnnnnnnnnnnnnnnnnnnnnnnnnnnnnnnnnnnnnnnnnnnnnnnnnnnnnnnnnnnnnnnnnnnnnnnnnnnnnnnnnnnnnnnnnnnnnnnnnnnnnnnnnnnnnnnnnnnnnnnnnnnnnnnnnnnnnnnnnnnnnnnnnnnnnnnnnnnnnnnnnnnnnnnnnnnnnnnnnnnnnnnnnnnnnnnnnnnnnnnnnnnnnnnnnnnnnnnnnnnnnnnnnnnnnnnnnnnnnnnnnnnnnnnnnnnnnnnnnnnnnnnnnnnnnnnnnnnnnnnnnnnnnnnnnnnnnnnnnnnnnnnnnnnnnnnnnnnnnnnnnnnnnnnnnnnnnnnnnnnnnnnnnnnnnnnnnnnnnnnnnnnnnnnnnnnnnnnnnnnnnnnnnnnnnnnnnnnnnnnnnnnnnnnnnnnnnnnnnnnnnnnnnnnnnnnnnnnnnnnnnnnnnnnnnnnnnnnnnnnnnnnnnnnnnnnnnnnnnnnnnnnnnnnnnnnnnnnnnnnnnnnnnnnnnnnnnnnnnnnnnnnnnnnnnnnnnnnnnnnnnnnnnnnnnnnnnnnnnnnnnnnnnnnnnnnnnnnnnnnnnnnnnnnnnnnnnnnnnnnnnnnnnnnnnnnnnnnnnnnnnnnnnnnnnnnnnnnnnnnnnnnnnnnnnnnnnnnnnnnnnnnnnnnnnnnnnnnnnnnnnnnnnnnnnnnnnnnnnnnnnnnnnnnnnnnnnnnnnnnnnnnnnnnnnnnnnnnnnnnnnnnnnnnnnnnnnnnnnnnnnnnnnnnnnnnnnnnnnnnnnnnnnnnnnnnnnnnnnnnnnnnnnnnnnnnnnnnnnnnnnnnnnnnnnnnnnnnnnnnnnnnnnnnnnnnnnnnnnnnnnnnnnnnnnnnnnnnnnnnnnnnnnnnnnnnnnnnnnnnnnnnnnnnnnnnnnnnnnnnnnnnnnnnnnnnnnnnnnnnnnnnnnnnnnnnnnnnnnnnnnnnnnnnnnnnnnnnnnnnnnnnnnnnnnnnnnnnnnnnnnnnnnnnnnnnnnnnnnnnnnnnnnnnnnnnnnnnnnnnnnnnnnnnnnnnnnnnnnnnnnnnnnnnnnnnnnnnnnnnnnnnnnnnnnnnnnnnnnnnnnnnnnnnnnnnnnnnnnnnnnnnnnnnnnnnnnnnnnnnnnnnnnnnnnnnnnnnnnnnnnnnnnnnnnnnnnnnnnnnnnnnnnnnnnnnnnnnnnnnnnnnnnnnnnnnnnnnnnnnnnnnnnnnnnnnnnnnnnnnnnnnnnnnnnnnnnnnnnnnnnnnnnnnnnnnnnnnnnnnnnnnnnnnnnnnnnnnnnnnnnnnnnnnnnnnnnnnnnnnnnnnnnnnnnnnnnnnnnnnnnnnnnnnnnnnnnnnnnnnnnnnnnnnnnnnnnnnnnnnnnnnnnnnnnnnnnnnnnnnnnnnnnnnnnnnnnnnnnnnnnnnnnnnnnnnnnnnnnnnnnnnnnnnnnnnnnnnnnnnnnnnnnnnnnnnnnnnnnnnnnnnnnnnnnnnnnnnnnnnnnnnnnnnnnnnnnnnnnnnnnnnnnnnnnnnnnnnnnnnnnnnnnnnnnnnnnnnnnnnnnnnnnnnnnnnnnnnnnnnnnnnnnnnnnnnnnnnnnnnnnnnnnnnnnnnnnnnnnnnnnnnnnnnnnnnnnnnnnnnnnnnnnnnnnnnnnnnnnnnnnnnnnnnnnnnnnnnnnnnnnnnnnnnnnnnnnnnnnnnnnnnnnnnnnnnnnnnnnnnnnnnnnnnnnnnnnnnnnnnnnnnnnnnnnnnnnnnnnnnnnnnnnnnnnnnnnnnnnnnnnnnnnnnnnnnnnnnnnnnnnnnnnnnnnnnnnnnnnnnnnnnnnnnnnnnnnnnnnnnnnnnnnnnnnnnnnnnnnnnnnnnnnnnnnnnnnnnnnnnnnnnnnnnnnnnnnnnnnnnnnnnnnnnnnnnnnnnnnnnnnnnnnnnnnnnnnnnnnnnnnnnnnnnnnnnnnnnnnnnnnnnnnnnnnnnnnnnnnnnnnnnnnnnnnnnnnnnnnnnnnnnnnnnnnnnnnnnnnnnnnnnnnnnnnnnnnnnnnnnnnnnnnnnnnnnnnnnnnnnnnnnnnnnnnnnnnnnnnnnnnnnnnnnnnnnnnnnnnnnnnnnnnnnnnnnnnnnnnnnnnnnnnnnnnnnnnnnnnnnnnnnnnnnnnnnnnnnnnnnnnnnnnnnnnnnnnnnnnnnnnnnnnnnnnnnnnnnnnnnnnnnnnnnnnnnnnnnnnnnnnnnnnnnnnnnnnnnnnnnnnnnnnnnnnnnnnnnnnnnnnnnnnnnnnnnnnnnnnnnnnnnnnnnnnnnnnnnnnnnnnnnnnnnnnnnnnnnnnnnnnnnnnnnnnnnnnnnnnnnnnnnnnnnnnnnnnnnnnnnnnnnnnnnnnnnnnnnnnnnnnnnnnnnnnnnnnnnnnnnnnnnnnnnnnnnnnnnnnnnnnnnnnnnnnnnnnnnnnnnnnnnnnnnnnnnnnnnnnnnnnnnnnnnnnnnnnnnnnnnnnnnnnnnnnnnnnnnnnnnnnnnnnnnnnnnnnnnnnnnnnnnnnnnnnnnnnnnnnnnnnnnnnnnnnnnnnnnnnnnnnnnnnnnnnnnnnnnnnnnnnnnnnnnnnnnnnnnnnnnnnnnnnnnnnnnnnnnnnnnnnnnnnnnnnnnnnnnnnnnnnnnnnnnnnnnnnnnnnnnnnnnnnnnnnnnnnnnnnnnnnnnnnnnnnnnnnnnnnnnnnnnnnnnnnnnnnnnnnnnnnnnnnnnnnnnnnnnnnnnnnnnnnnnnnnnnnnnnnnnnnnnnnnnnnnnnnnnnnnnnnnnnnnnnnnnnnnnnnnnnnnnnnnnnnnnnnnnnnnnnnnnnnnnnnnnnnnnnnnnnnnnnnnnnnnnnnnnnnnnnnnnnnnnnnnnnnnnnnnnnnnnnnnnnnnnnnnnnnnnnnnnnnnnnnnnnnnnnnnnnnnnnnnnnnnnnnnnnnnnnnnnnnnnnnnnnnnnnnnnnnnnnnnnnnnnnnnnnnnnnnnnnnnnnnnnnnnnnnnnnnnnnnnnnnnnnnnnnnnnnnnnnnnnnnnnnnnnnnnnnnnnnnnnnnnnnnnnnnnnnnnnnnnnnnnnnnnnnnnnnnnnnnnnnnnnnnnnnnnnnnnnnnnnnnnnnnnnnnnnnnnnnnnnnnnnnnnnnnnnnnnnnnnnnnnnnnnnnnnnnnnnnnnnnnnnnnnnnnnnnnnnnnnnnnnnnnnnnnnnnnnnnnnnnnnnnnnnnnnnnnnnnnnnnnnnnnnnnnnnnnnnnnnnnnnnnnnnnnnnnnnnnnnnnnnnnnnnnnnnnnnnnnnnnnnnnnnnnnnnnnnnnnnnnnnnnnnnnnnnnnnnnnnnnnnnnnnnnnnnnnnnnnnnnnnnnnnnnnnnnnnnnnnnnnnnnnnnnnnnnnnnnnnnnnnnnnnnnnnnnnnnnnnnnnnnnnnnnnnnnnnnnnnnnnnnnnnnnnnnnnnnnnnnnnnnnnnnnnnnnnnnnnnnnnnnnnnnnnnnnnnnnnnnnnnnnnnnnnnnnnnnnnnnnnnnnnnnnnnnnnnnnnnnnnnnnnnnnnnnnnnnnnnnnnnnnnnnnnnnnnnnnnnnnnnnnnnnnnnnnnnnnnnnnnnnnnnnnnnnnnnnnnnnnnnnnnnnnnnnnnnnnnnnnnnnnnnnnnnnnnnnnnnnnnnnnnnnnnnnnnnnnnnnnnnnnnnnnnnnnnnnnnnnnnnnnnnnnnnnnnnnnnnnnnnnnnnnnnnnnnnnnnnnnnnnnnnnnnnnnnnnnnnnnnnnnnnnnnnnnnnnnnnnnnnnnnnnnnnnnnnnnnnnnnnnnnnnnnnnnnnnnnnnnnnnnnnnnnnnnnnnnnnnnnnnnnnnnnnnnnnnnnnnnnnnnnnnnnnnnnnnnnnnnnnnnnnnnnnnnnnnnnnnnnnnnnnnnnnnnnnnnnnnnnnnnnnnnnnnnnnnnnnnnnnnnnnnnnnnnnnnnnnnnnnnnnnnnnnnnnnnnnnnnnnnnnnnnnnnnnnnnnnnnnnnnnnnnnnnnnnnnnnnnnnnnnnnnnnnnnnnnnnnnnnnnnnnnnnnnnnnnnnnnnnnnnnnnnnnnnnnnnnnnnnnnnnnnnnnnnnnnnnnnnnnnnnnnnnnnnnnnnnnnnnnnnnnnnnnnnnnnnnnnnnnnnnnnnnnnnnnnnnnnnnnnnnnnnnnnnnnnnnnnnnnnnnnnnnnnnnnnnnnnnnnnnnnnnnnnnnnnnnnnnnnnnnnnnnnnnnnnnnnnnnnnnnnnnnnnnnnnnnnnnnnnnnnnnnnnnnnnnnnnnnnnnnnnnnnnnnnnnnnnnnnnnnnnnnnnnnnnnnnnnnnnnnnnnnnnnnnnnnnnnnnnnnnnnnnnnnnnnnnnnnnnnnnnnnnnnnnnnnnnnnnnnnnnnnnnnnnnnnnnnnnnnnnnnnnnnnnnnnnnnnnnnnnnnnnnnnnnnnnnnnnnnnnnnnnnnnnnnnnnnnnnnnnnnnnnnnnnnnnnnnnnnnnnnnnnnnnnnnnnnnnnnnnnnnnnnnnnnnnnnnnnnnnnnnnnnnnnnnnnnnnnnnnnnnnnnnnnnnnnnnnnnnnnnnnnnnnnnnnnnnnnnnnnnnnnnnnnnnnnnnnnnnnnnnnnnnnnnnnnnnnnnnnnnnnnnnnnnnnnnnnnnnnnnnnnnnnnnnnnnnnnnnnnnnnnnnnnnnnnnnnnnnnnnnnnnnnnnnnnnnnnnnnnnnnnnnnnnnnnnnnnnnnnnnnnnnnnnnnnnnnnnnnnnnnnnnnnnnnnnnnnnnnnnnnnnnnnnnnnnnnnnnnnnnnnnnnnnnnnnnnnnnnnnnnnnnnnnnnnnnnnnnnnnnnnnnnnnnnnnnnnnnnnnnnnnnnnnnnnnnnnnnnnnnnnnnnnnnnnnnnnnnnnnnnnnnnnnnnnnnnnnnnnnnnnnnnnnnnnnnnnnnnnnnnnnnnnnnnnnnnnnnnnnnnnnnnnnnnnnnnnnnnnnnnnnnnnnnnnnnnnnnnnnnnnnnnnnnnnnnnnnnnnnnnnnnnnnnnnnnnnnnnnnnnnnnnnnnnnnnnnnnnnnnnnnnnnnnnnnnnnnnnnnnnnnnnnnnnnnnnnnnnnnnnnnnnnnnnnnnnnnnnnnnnnnnnnnnnnnnnnnnnnnnnnnnnnnnnnnnnnnnnnnnnnnnnnnnnnnnnnnnnnnnnnnnnnnnnnnnnnnnnnnnnnnnnnnnnnnnnnnnnnnnnnnnnnnnnnnnnnnnnnnnnnnnnnnnnnnnnnnnnnnnnnnnnnnnnnnnnnnnnnnnnnnnnnnnnnnnnnnnnnnnnnnnnnnnnnnnnnnnnnnnnnnnnnnnnnnnnnnnnnnnnnnnnnnnnnnnnnnnnnnnnnnnnnnnnnnnnnnnnnnnnnnnnnnnnnnnnnnnnnnnnnnnnnnnnnnnnnnnnnnnnnnnnnnnnnnnnnnnnnnnnnnnnnnnnnnnnnnnnnnnnnnnnnnnnnnnnnnnnnnnnnnnnnnnnnnnnnnnnnnnnnnnnnnnnnnnnnnnnnnnnnnnnnnnnnnnnnnnnnnnnnnnnnnnnnnnnnnnnnnnnnnnnnnnnnnnnnnnnnnnnnnnnnnnnnnnnnnnnnnnnnnnnnnnnnnnnnnnnnnnnnnnnnnnnnnnnnnnnnnnnnnnnnnnnnnnnnnnnnnnnnnnnnnnnnnnnnnnnnnnnnnnnnnnnnnnnnnnnnnnnnnnnnnnnnnnnnnnnnnnnnnnnnnnnnnnnnnnnnnnnnnnnnnnnnnnnnnnnnnnnnnnnnnnnnnnnnnnnnnnnnnnnnnnnnnnnnnnnnnnnnnnnnnnnnnnnnnnnnnnnnnnnnnnnnnnnnnnnnnnnnnnnnnnnnnnnnnnnnnnnnnnnnnnnnnnnnnnnnnnnnnnnnnnnnnnnnnnnnnnnnnnnnnnnnnnnnnnnnnnnnnnnnnnnnnnnnnnnnnnnnnnnnnnnnnnnnnnnnnnnnnnnnnnnnnnnnnnnnnnnnnnnnnnnnnnnnnnnnnnnnnnnnnnnnnnnnnnnnnnnnnnnnnnnnnnnnnnnnnnnnnnnnnnnnnnnnnnnnnnnnnnnnnnnnnnnnnnnnnnnnnnnnnnnnnnnnnnnnnnnnnnnnnnnnnnnnnnnnnnnnnnnnnnnnnnnnnnnnnnnnnnnnnnnnnnnnnnnnnnnnnnnnnnnnnnnnnnnnnnnnnnnnnnnnnnnnnnnnnnnnnnnnnnnnnnnnnnnnnnnnnnnnnnnnnnnnnnnnnnnnnnnnnnnnnnnnnnnnnnnnnnnnnnnnnnnnnnnnnnnnnnnnnnnnnnnnnnnnnnnnnnnnnnnnnnnnnnnnnnnnnnnnnnnnnnnnnnnnnnnnnnnnnnnnnnnnnnnnnnnnnnnnnnnnnnnnnnnnnnnnnnnnnnnnnnnnnnnnnnnnnnnnnnnnnnnnnnnnnnnnnnnnnnnnnnnnnnnnnnnnnnnnnnnnnnnnnnnnnnnnnnnnnnnnnnnnnnnnnnnnnnnnnnnnnnnnnnnnnnnnnnnnnnnnnnnnnnnnnnnnnnnnnnnnnnnnnnnnnnnnnnnnnnnnnnnnnnnnnnnnnnnnnnnnnnnnnnnnnnnnnnnnnnnnnnnnnnnnnnnnnnnnnnnnnnnnnnnnnnnnnnnnnnnnnnnnnnnnnnnnnnnnnnnnnnnnnnnnnnnnnnnnnnnnnnnnnnnnnnnnnnnnnnnnnnnnnnnnnnnnnnnnnnnnnnnnnnnnnnnnnnnnnnnnnnnnnnnnnnnnnnnnnnnnnnnnnnnnnnnnnnnnnnnnnnnnnnnnnnnnnnnnnnnnnnnnnnnnnnnnnnnnnnnnnnnnnnnnnnnnnnnnnnnnnnnnnnnnnnnnnnnnnnnnnnnnnnnnnnnnnnnnnnnnnnnnnnnnnnnnnnnnnnnnnnnnnnnnnnnnnnnnnnnnnnnnnnnnnnnnnnnnnnnnnnnnnnnnnnnnnnnnnnnnnnnnnnnnnnnnnnnnnnnnnnnnnnnnnnnnnnnnnnnnnnnnnnnnnnnnnnnnnnnnnnnnnnnnnnnnnnnnnnnnnnnnnnnnnnnnnnnnnnnnnnnnnnnnnnnnnnnnnnnnnnnnnnnnnnnnnnnnnnnnnnnnnnnnnnnnnnnnnnnnnnnnnnnnnnnnnnnnnnnnnnnnnnnnnnnnnnnnnnnnnnnnnnnnnnnnnnnnnnnnnnnnnnnnnnnnnnnnnnnnnnnnnnnnnnnnnnnnnnnnnnnnnnnnnnnnnnnnnnnnnnnnnnnnnnnnnnnnnnnnnnnnnnnnnnnnnnnnnnnnnnnnnnnnnnnnnnnnnnnnnnnnnnnnnnnnnnnnnnnnnnnnnnnnnnnnnnnnnnnnnnnnnnnnnnnnnnnnnnnnnnnnnnnnnnnnnnnnnnnnnnnnnnnnnnnnnnnnnnnnnnnnnnnnnnnnnnnnnnnnnnnnnnnnnnnnnnnnnnnnnnnnnnnnnnnnnnnnnnnnnnnnnnnnnnnnnnnnnnnnnnnnnnnnnnnnnnnnnnnnnnnnnnnnnnnnnnnnnnnnnnnnnnnnnnnnnnnnnnnnnnnnnnnnnnnnnnnnnnnnnnnnnnnnnnnnnnnnnnnnnnnnnnnnnnnnnnnnnnnnnnnnnnnnnnnnnnnnnnnnnnnnnnnnnnnnnnnnnnnnnnnnnnnnnnnnnnnnnnnnnnnnnnnnnnnnnnnnnnnnnnnnnnnnnnnnnnnnnnnnnnnnnnnnnnnnnnnnnnnnnnnnnnnnnnnnnnnnnnnnnnnnnnnnnnnnnnnnnnnnnnnnnnnnnnnnnnnnnnnnnnnnnnnnnnnnnnnnnnnnnnnnnnnnnnnnnnnnnnnnnnnnnnnnnnnnnnnnnnnnnnnnnnnnnnnnnnnnnnnnnnnnnnnnnnnnnnnnnnnnnnnnnnnnnnnnnnnnnnnnnnnnnnnnnnnnnnnnnnnnnnnnnnnnnnnnnnnnnnnnnnnnnnnnnnnnnnnnnnnnnnnnnnnnnnnnnnnnnnnnnnnnnnnnnnnnnnnnnnnnnnnnnnnnnnnnnnnnnnnnnnnnnnnnnnnnnnnnnnnnnnnnnnnnnnnnnnnnnnnnnnnnnnnnnnnnnnnnnnnnnnnnnnnnnnnnnnnnnnnnnnnnnnnnnnnnnnnnnnnnnnnnnnnnnnnnnnnnnnnnnnnnnnnnnnnnnnnnnnnnnnnnnnnnnnnnnnnnnnnnnnnnnnnnnnnnnnnnnnnnnnnnnnnnnnnnnnnnnnnnnnnnnnnnnnnnnnnnnnnnnnnnnnnnnnnnnnnnnnnnnnnnnnnnnnnnnnnnnnnnnnnnnnnnnnnnnnnnnnnnnnnnnnnnnnnnnnnnnnnnnnnnnnnnnnnnnnnnnnnnnnnnnnnnnnnnnnnnnnnnnnnnnnnnnnnnnnnnnnnnnnnnnnnnnnnnnnnnnnnnnnnnnnnnnnnnnnnnnnnnnnnnnnnnnnnnnnnnnnnnnnnnnnnnnnnnnnnnnnnnnnnnnnnnnnnnnnnnnnnnnnnnnnnnnnnnnnnnnnnnnnnnnnnnnnnnnnnnnnnnnnnnnnnnnnnnnnnnnnnnnnnnnnnnnnnnnnnnnnnnnnnnnnnnnnnnnnnnnnnnnnnnnnnnnnnnnnnnnnnnnnnnnnnnnnnnnnnnnnnnnnnnnnnnnnnnnnnnnnnnnnnnnnnnnnnnnnnnnnnnnnnnnnnnnnnnnnnnnnnnnnnnnnnnnnnnnnnnnnnnnnnnnnnnnnnnnnnnnnnnnnnnnnnnnnnnnnnnnnnnnnnnnnnnnnnnnnnnnnnnnnnnnnnnnnnnnnnnnnnnnnnnnnnnnnnnnnnnnnnnnnnnnnnnnnnnnnnnnnnnnnnnnnnnnnnnnnnnnnnnnnnnnnnnnnnnnnnnnnnnnnnnnnnnnnnnnnnnnnnnnnnnnnnnnnnnnnnnnnnnnnnnnnnnnnnnnnnnnnnnnnnnnnnnnnnnnnnnnnnnnnnnnnnnnnnnnnnnnnnnnnnnnnnnnnnnnnnnnnnnnnnnnnnnnnnnnnnnnnnnnnnnnnnnnnnnnnnnnnnnnnnnnnnnnnnnnnnnnnnnnnnnnnnnnnnnnnnnnnnnnnnnnnnnnnnnnnnnnnnnnnnnnnnnnnnnnnnnnnnnnnnnnnnnnnnnnnnnnnnnnnnnnnnnnnnnnnnnnnnnnnnnnnnnnnnnnnnnnnnnnnnnnnnnnnnnnnnnnnnnnnnnnnnnnnnnnnnnnnnnnnnnnnnnnnnnnnnnnnnnnnnnnnnnnnnnnnnnnnnnnnnnnnnnnnnnnnnnnnnnnnnnnnnnnnnnnnnnnnnnnnnnnnnnnnnnnnnnnnnnnnnnnnnnnnnnnnnnnnnnnnnnnnnnnnnnnnnnnnnnnnnnnnnnnnnnnnnnnnnnnnnnnnnnnnnnnnnnnnnnnnnnnnnnnnnnnnnnnnnnnnnnnnnnnnnnnnnnnnnnnnnnnnnnnnnnnnnnnnnnnnnnnnnnnnnnnnnnnnnnnnnnnnnnnnnnnnnnnnnnnnnnnnnnnnnnnnnnnnnnnnnnnnnnnnnnnnnnnnnnnnnnnnnnnnnnnnnnnnnnnnnnnnnnnnnnnnnnnnnnnnnnnnnnnnnnnnnnnnnnnnnnnnnnnnnnnnnnnnnnnnnnnnnnnnnnnnnnnnnnnnnnnnnnnnnnnnnnnnnnnnnnnnnnnnnnnnnnnnnnnnnnnnnnnnnnnnnnnnnnnnnnnnnnnnnnnnnnnnnnnnnnnnnnnnnnnnnnnnnnnnnnnnnnnnnnnnnnnnnnnnnnnnnnnnnnnnnnnnnnnnnnnnnnnnnnnnnnnnnnnnnnnnnnnnnnnnnnnnnnnnnnnnnnnnnnnnnnnnnnnnnnnnnnnnnnnnnnnnnnnnnnnnnnnnnnnnnnnnnnnnnnnnnnnnnnnnnnnnnnnnnnnnnnnnnnnnnnnnnnnnnnnnnnnnnnnnnnnnnnnnnnnnnnnnnnnnnnnnnnnnnnnnnnnnnnnnnnnnnnnnnnnnnnnnnnnnnnnnnnnnnnnnnnnnnnnnnnnnnnnnnnnnnnnnnnnnnnnnnnnnnnnnnnnnnnnnnnnnnnnnnnnnnnnnnnnnnnnnnnnnnnnnnnnnnnnnnnnnnnnnnnnnnnnnnnnnnnnnnnnnnnnnnnnnnnnnnnnnnnnnnnnnnnnnnnnnnnnnnnnnnnnnnnnnnnnnnnnnnnnnnnnnnnnnnnnnnnnnnnnnnnnnnnnnnnnnnnnnnnnnnnnnnnnnnnnnnnnnnnnnnnnnnnnnnnnnnnnnnnnnnnnnnnnnnnnnnnnnnnnnnnnnnnnnnnnnnnnnnnnnnnnnnnnnnnnnnnnnnnnnnnnnnnnnnnnnnnnnnnnnnnnnnnnnnnnnnnnnnnnnnnnnnnnnnnnnnnnnnnnnnnnnnnnnnnnnnnnnnnnnnnnnnnnnnnnnnnnnnnnnnnnnnnnnnnnnnnnnnnnnnnnnnnnnnnnnnnnnnnnnnnnnnnnnnnnnnnnnnnnnnnnnnnnnnnnnnnnnnnnnnnnnnnnnnnnnnnnnnnnnnnnnnnnnnnnnnnnnnnnnnnnnnnnnnnnnnnnnnnnnnnnnnnnnnnnnnnnnnnnnnnnnnnnnnnnnnnnnnnnnnnnnnnnnnnnnnnnnnnnnnnnnnnnnnnnnnnnnnnnnnnnnnnnnnnnnnnnnnnnnnnnnnnnnnnnnnnnnnnnnnnnnnnnnnnnnnnnnnnnnnnnnnnnnnnnnnnnnnnnnnnnnnnnnnnnnnnnnnnnnnnnnnnnnnnnnnnnnnnnnnnnnnnnnnnnnnnnnnnnnnnnnnnnnnnnnnnnnnnnnnnnnnnnnnnnnnnnnnnnnnnnnnnnnnnnnnnnnnnnnnnnnnnnnnnnnnnnnnnnnnnnnnnnnnnnnnnnnnnnnnnnnnnnnnnnnnnnnnnnnnnnnnnnnnnnnnnnnnnnnnnnnnnnnnnnnnnnnnnnnnnnnnnnnnnnnnnnnnnnnnnnnnnnnnnnnnnnnnnnnnnnnnnnnnnnnnnnnnnnnnnnnnnnnnnnnnnnnnnnnnnnnnnnnnnnnnnnnnnnnnnnnnnnnnnnnnnnnnnnnnnnnnnnnnnnnnnnnnnnnnnnnnnnnnnnnnnnnnnnnnnnnnnnnnnnnnnnnnnnnnnnnnnnnnnnnnnnnnnnnnnnnnnnnnnnnnnnnnnnnnnnnnnnnnnnnnnnnnnnnnnnnnnnnnnnnnnnnnnnnnnnnnnnnnnnnnnnnnnnnnnnnnnnnnnnnnnnnnnnnnnnnnnnnnnnnnnnnnnnnnnnnnnnnnnnnnnnnnnnnnnnnnnnnnnnnnnnnnnnnnnnnnnnnnnnnnnnnnnnnnnnnnnnnnnnnnnnnnnnnnnnnnnnnnnnnnnnnnnnnnnnnnnnnnnnnnnnnnnnnnnnnnnnnnnnnnnnnnnnnnnnnnnnnnnnnnnnnnnnnnnnnnnnnnnnnnnnnnnnnnnnnnnnnnnnnnnnnnnnnnnnnnnnnnnnnnnnnnnnnnnnnnnnnnnnnnnnnnnnnnnnnnnnnnnnnnnnnnnnnnnnnnnnnnnnnnnnnnnnnnnnnnnnnnnnnnnnnnnnnnnnnnnnnnnnnnnnnnnnnnnnnnnnnnnnnnnnnnnnnnnnnnnnnnnnnnnnnnnnnnnnnnnnnnnnnnnnnnnnnnnnnnnnnnnnnnnnnnnnnnnnnnnnnnnnnnnnnnnnnnnnnnnnnnnnnnnnnnnnnnnnnnnnnnnnnnnnnnnnnnnnnnnnnnnnnnnnnnnnnnnnnnnnnnnnnnnnnnnnnnnnnnnnnnnnnnnnnnnnnnnnnnnnnnnnnnnnnnnnnnnnnnnnnnnnnnnnnnnnnnnnnnnnnnnnnnnnnnnnnnnnnnnnnnnnnnnnnnnnnnnnnnnnnnnnnnnnnnnnnnnnnnnnnnnnnnnnnnnnnnnnnnnnnnnnnnnnnnnnnnnnnnnnnnnnnnnnnnnnnnnnnnnnnnnnnnnnnnnnnnnnnnnnnnnnnnnnnnnnnnnnnnnnnnnnnnnnnnnnnnnnnnnnnnnnnnnnnnnnnnnnnnnnnnnnnnnnnnnnnnnnnnnnnnnnnnnnnnnnnnnnnnnnnnnnnnnnnnnnnnnnnnnnnnnnnnnnnnnnnnnnnnnnnnnnnnnnnnnnnnnnnnnnnnnnnnnnnnnnnnnnnnnnnnnnnnnnnnnnnnnnnnnnnnnnnnnnnnnnnnnnnnnnnnnnnnnnnnnnnnnnnnnnnnnnnnnnnnnnnnnnnnnnnnnnnnnnnnnnnnnnnnnnnnnnnnnnnnnnnnnnnnnnnnnnnnnnnnnnnnnnnnnnnnnnnnnnnnnnnnnnnnnnnnnnnnnnnnnnnnnnnnnnnnnnnnnnnnnnnnnnnnnnnnnnnnnnnnnnnnnnnnnnnnnnnnnnnnnnnnnnnnnnnnnnnnnnnnnnnnnnnnnnnnnnnnnnnnnnnnnnnnnnnnnnnnnnnnnnnnnnnnnnnnnnnnnnnnnnnnnnnnnnnnnnnnnnnnnnnnnnnnnnnnnnnnnnnnnnnnnnnnnnnnnnnnnnnnnnnnnnnnnnnnnnnnnnnnnnnnnnnnnnnnnnnnnnnnnnnnnnnnnnnnnnnnnnnnnnnnnnnnnnnnnnnnnnnnnnnnnnnnnnnnnnnnnnnnnnnnnnnnnnnnnnnnnnnnnnnnnnnnnnnnnnnnnnnnnnnnnnnnnnnnnnnnnnnnnnnnnnnnnnnnnnnnnnnnnnnnnnnnnnnnnnnnnnnnnnnnnnnnnnnnnnnnnnnnnnnnnnnnnnnnnnnnnnnnnnnnnnnnnnnnnnnnnnnnnnnnnnnnnnnnnnnnnnnnnnnnnnnnnnnnnnnnnnnnnnnnnnnnnnnnnnnnnnnnnnnnnnnnnnnnnnnnnnnnnnnnnnnnnnnnnnnnnnnnnnnnnnnnnnnnnnnnnnnnnnnnnnnnnnnnnnnnnnnnnnnnnnnnnnnnnnnnnnnnnnnnnnnnnnnnnnnnnnnnnnnnnnnnnnnnnnnnnnnnnnnnnnnnnnnnnnnnnnnnnnnnnnnnnnnnnnnnnnnnnnnnnnnnnnnnnnnnnnnnnnnnnnnnnnnnnnnnnnnnnnnnnnnnnnnnnnnnnnnnnnnnnnnnnnnnnnnnnnnnnnnnnnnnnnnnnnnnnnnnnnnnnnnnnnnnnnnnnnnnnnnnnnnnnnnnnnnnnnnnnnnnnnnnnnnnnnnnnnnnnnnnnnnnnnnnnnnnnnnnnnnnnnnnnnnnnnnnnnnnnnnnnnnnnnnnnnnnnnnnnnnnnnnnnnnnnnnnnnnnnnnnnnnnnnnnnnnnnnnnnnnnnnnnnnnnnnnnnnnnnnnnnnnnnnnnnnnnnnnnnnnnnnnnnnnnnnnnnnnnnnnnnnnnnnnnnnnnnnnnnnnnnnnnnnnnnnnnnnnnnnnnnnnnnnnnnnnnnnnnnnnnnnnnnnnnnnnnnnnnnnnnnnnnnnnnnnnnnnnnnnnnnnnnnnnnnnnnnnnnnnnnnnnnnnnnnnnnnnnnnnnnnnnnnnnnnnnnnnnnnnnnnnnnnnnnnnnnnnnnnnnnnnnnnnnnnnnnnnnnnnnnnnnnnnnnnnnnnnnnnnnnnnnnnnnnnnnnnnnnnnnnnnnnnnnnnnnnnnnnnnnnnnnnnnnnnnnnnnnnnnnnnnnnnnnnnnnnnnnnnnnnnnnnnnnnnnnnnnnnnnnnnnnnnnnnnnnnnnnnnnnnnnnnnnnnnnnnnnnnnnnnnnnnnnnnnnnnnnnnnnnnnnnnnnnnnnnnnnnnnnnnnnnnnnnnnnnnnnnnnnnnnnnnnnnnnnnnnnnnnnnnnnnnnnnnnnnnnnnnnnnnnnnnnnnnnnnnnnnnnnnnnnnnnnnnnnnnnnnnnnnnnnnnnnnnnnnnnnnnnnnnnnnnnnnnnnnnnnnnnnnnnnnnnnnnnnnnnnnnnnnnnnnnnnnnnnnnnnnnnnnnnnnnnnnnnnnnnnnnnnnnnnnnnnnnnnnnnnnnnnnnnnnnnnnnnnnnnnnnnnnnnnnnnnnnnnnnnnnnnnnnnnnnnnnnnnnnnnnnnnnnnnnnnnnnnnnnnnnnnnnnnnnnnnnnnnnnnnnnnnnnnnnnnnnnnnnnnnnnnnnnnnnnnnnnnnnnnnnnnnnnnnnnnnnnnnnnnnnnnnnnnnnnnnnnnnnnnnnnnnnnnnnnnnnnnnnnnnnnnnnnnnnnnnnnnnnnnnnnnnnnnnnnnnnnnnnnnnnnnnnnnnnnnnnnnnnnnnnnnnnnnnnnnnnnnnnnnnnnnnnnnnnnnnnnnnnnnnnnnnnnnnnnnnnnnnnnnnnnnnnnnnnnnnnnnnnnnnnnnnnnnnnnnnnnnnnnnnnnnnnnnnnnnnnnnnnnnnnnnnnnnnnnnnnnnnnnnnnnnnnnnnnnnnnnnnnnnnnnnnnnnnnnnnnnnnnnnnnnnnnnnnnnnnnnnnnnnnnnnnnnnnnnnnnnnnnnnnnnnnnnnnnnnnnnnnnnnnnnnnnnnnnnnnnnnnnnnnnnnnnnnnnnnnnnnnnnnnnnnnnnnnnnnnnnnnnnnnnnnnnnnnnnnnnnnnnnnnnnnnnnnnnnnnnnnnnnnnnnnnnnnnnnnnnnnnnnnnnnnnnnnnnnnnnnnnnnnnnnnnnnnnnnnnnnnnnnnnnnnnnnnnnnnnnnnnnnnnnnnnnnnnnnnnnnnnnnnnnnnnnnnnnnnnnnnnnnnnnnnnnnnnnnnnnnnnnnnnnnnnnnnnnnnnnnnnnnnnnnnnnnnnnnnnnnnnnnnnnnnnnnnnnnnnnnnnnnnnnnnnnnnnnnnnnnnnnnnnnnnnnnnnnnnnnnnnnnnnnnnnnnnnnnnnnnnnnnnnnnnnnnnnnnnnnnnnnnnnnnnnnnnnnnnnnnnnnnnnnnnnnnnnnnnnnnnnnnnnnnnnnnnnnnnnnnnnnnnnnnnnnnnnnnnnnnnnnnnnnnnnnnnnnnnnnnnnnnnnnnnnnnnnnnnnnnnnnnnnnnnnnnnnnnnnnnnnnnnnnnnnnnnnnnnnnnnnnnnnnnnnnnnnnnnnnnnnnnnnnnnnnnnnnnnnnnnnnnnnnnnnnnnnnnnnnnnnnnnnnnnnnnnnnnnnnnnnnnnnnnnnnnnnnnnnnnnnnnnnnnnnnnnnnnnnnnnnnnnnnnnnnnnnnnnnnnnnnnnnnnnnnnnnnnnnnnnnnnnnnnnnnnnnnnnnnnnnnnnnnnnnnnnnnnnnnnnnnnnnnnnnnnnnnnnnnnnnnnnnnnnnnnnnnnnnnnnnnnnnnnnnnnnnnnnnnnnnnnnnnnnnnnnnnnnnnnnnnnnnnnnnnnnnnnnnnnnnnnnnnnnnnnnnnnnnnnnnnnnnnnnnnnnnnnnnnnnnnnnnnnnnnnnnnnnnnnnnnnnnnnnnnnnnnnnnnnnnnnnnnnnnnnnnnnnnnnnnnnnnnnnnnnnnnnnnnnnnnnnnnnnnnnnnnnnnnnnnnnnnnnnnnnnnnnnnnnnnnnnnnnnnnnnnnnnnnnnnnnnnnnnnnnnnnnnnnnnnnnnnnnnnnnnnnnnnnnnnnnnnnnnnnnnnnnnnnnnnnnnnnnnnnnnnnnnnnnnnnnnnnnnnnnnnnnnnnnnnnnnnnnnnnnnnnnnnnnnnnnnnnnnnnnnnnnnnnnnnnnnnnnnnnnnnnnnnnnnnnnnnnnnnnnnnnnnnnnnnnnnnnnnnnnnnnnnnnnnnnnnnnnnnnnnnnnnnnnnnnnnnnnnnnnnnnnnnnnnnnnnnnnnnnnnnnnnnnnnnnnnnnnnnnnnnnnnnnnnnnnnnnnnnnnnnnnnnnnnnnnnnnnnnnnnnnnnnnnnnnnnnnnnnnnnnnnnnnnnnnnnnnnnnnnnnnnnnnnnnnnnnnnnnnnnnnnnnnnnnnnnnnnnnnnnnnnnnnnnnnnnnnnnnnnnnnnnnnnnnnnnnnnnnnnnnnnnnnnnnnnnnnnnnnnnnnnnnnnnnnnnnnnnnnnnnnnnnnnnnnnnnnnnnnnnnnnnnnnnnnnnnnnnnnnnnnnnnnnnnnnnnnnnnnnnnnnnnnnnnnnnnnnnnnnnnnnnnnnnnnnnnnnnnnnnnnnnnnnnnnnnnnnnnnnnnnnnnnnnnnnnnnnnnnnnnnnnnnnnnnnnnnnnnnnnnnnnnnnnnnnnnnnnnnnnnnnnnnnnnnnnnnnnnnnnnnnnnnnnnnnnnnnnnnnnnnnnnnnnnnnnnnnnnnnnnnnnnnnnnnnnnnnnnnnnnnnnnnnnnnnnnnnnnnnnnnnnnnnnnnnnnnnnnnnnnnnnnnnnnnnnnnnnnnnnnnnnnnnnnnnnnnnnnnnnnnnnnnnnnnnnnnnnnnnnnnnnnnnnnnnnnnnnnnnnnnnnnnnnnnnnnnnnnnnnnnnnnnnnnnnnnnnnnnnnnnnnnnnnnnnnnnnnnnnnnnnnnnnnnnnnnnnnnnnnnnnnnnnnnnnnnnnnnnnnnnnnnnnnnnnnnnnnnnnnnnnnnnnnnnnnnnnnnnnnnnnnnnnnnnnnnnnnnnnnnnnnnnnnnnnnnnnnnnnnnnnnnnnnnnnnnnnnnnnnnnnnnnnnnnnnnnnnnnnnnnnnnnnnnnnnnnnnnnnnnnnnnnnnnnnnnnnnnnnnnnnnnnnnnnnnnnnnnnnnnnnnnnnnnnnnnnnnnnnnnnnnnnnnnnnnnnnnnnnnnnnnnnnnnnnnnnnnnnnnnnnnnnnnnnnnnnnnnnnnnnnnnnnnnnnnnnnnnnnnnnnnnnnnnnnnnnnnnnnnnnnnnnnnnnnnnnnnnnnnnnnnnnnnnnnnnnnnnnnnnnnnnnnnnnnnnnnnnnnnnnnnnnnnnnnnnnnnnnnnnnnnnnnnnnnnnnnnnnnnnnnnnnnnnnnnnnnnnnnnnnnnnnnnnnnnnnnnnnnnnnnnnnnnnnnnnnnnnnnnnnnnnnnnnnnnnnnnnnnnnnnnnnnnnnnnnnnnnnnnnnnnnnnnnnnnnnnnnnnnnnnnnnnnnnnnnnnnnnnnnnnnnnnnnnnnnnnnnnnnnnnnnnnnnnnnnnnnnnnnnnnnnnnnnnnnnnnnnnnnnnnnnnnnnnnnnnnnnnnnnnnnnnnnnnnnnnnnnnnnnnnnnnnnnnnnnnnnnnnnnnnnnnnnnnnnnnnnnnnnnnnnnnnnnnnnnnnnnnnnnnnnnnnnnnnnnnnnnnnnnnnnnnnnnnnnnnnnnnnnnnnnnnnnnnnnnnnnnnnnnnnnnnnnnnnnnnnnnnnnnnnnnnnnnnnnnnnnnnnnnnnnnnnnnnnnnnnnnnnnnnnnnnnnnnnnnnnnnnnnnnnnnnnnnnnnnnnnnnnnnnnnnnnnnnnnnnnnnnnnnnnnnnnnnnnnnnnnnnnnnnnnnnnnnnnnnnnnnnnnnnnnnnnnnnnnnnnnnnnnnnnnnnnnnnnnnnnnnnnnnnnnnnnnnnnnnnnnnnnnnnnnnnnnnnnnnnnnnnnnnnnnnnnnnnnnnnnnnnnnnnnnnnnnnnnnnnnnnnnnnnnnnnnnnnnnnnnnnnnnnnnnnnnnnnnnnnnnnnnnnnnnnnnnnnnnnnnnnnnnnnnnnnnnnnnnnnnnnnnnnnnnnnnnnnnnnnnnnnnnnnnnnnnnnnnnnnnnnnnnnnnnnnnnnnnnnnnnnnnnnnnnnnnnnnnnnnnnnnnnnnnnnnnnnnnnnnnnnnnnnnnnnnnnnnnnnnnnnnnnnnnnnnnnnnnnnnnnnnnnnnnnnnnnnnnnnnnnnnnnnnnnnnnnnnnnnnnnnnnnnnnnnnnnnnnnnnnnnnnnnnnnnnnnnnnnnnnnnnnnnnnnnnnnnnnnnnnnnnnnnnnnnnnnnnnnnnnnnnnnnnnnnnnnnnnnnnnnnnnnnnnnnnnnnnnnnnnnnnnnnnnnnnnnnnnnnnnnnnnnnnnnnnnnnnnnnnnnnnnnnnnnnnnnnnnnnnnnnnnnnnnnnnnnnnnnnnnnnnnnnnnnnnnnnnnnnnnnnnnnnnnnnnnnnnnnnnnnnnnnnnnnnnnnnnnnnnnnnnnnnnnnnnnnnnnnnnnnnnnnnnnnnnnnnnnnnnnnnnnnnnnnnnnnnnnnnnnnnnnnnnnnnnnnnnnnnnnnnnnnnnnnnnnnnnnnnnnnnnnnnnnnnnnnnnnnnnnnnnnnnnnnnnnnnnnnnnnnnnnnnnnnnnnnnnnnnnnnnnnnnnnnnnnnnnnnnnnnnnnnnnnnnnnnnnnnnnnnnnnnnnnnnnnnnnnnnnnnnnnnnnnnnnnnnnnnnnnnnnnnnnnnnnnnnnnnnnnnnnnnnnnnnnnnnnnnnnnnnnnnnnnnnnnnnnnnnnnnnnnnnnnnnnnnnnnnnnnnnnnnnnnnnnnnnnnnnnnnnnnnnnnnnnnnnnnnnnnnnnnnnnnnnnnnnnnnnnnnnnnnnnnnnnnnnnnnnnnnnnnnnnnnnnnnnnnnnnnnnnnnnnnnnnnnnnnnnnnnnnnnnnnnnnnnnnnnnnnnnnnnnnnnnnnnnnnnnnnnnnnnnnnnnnnnnnnnnnnnnnnnnnnnnnnnnnnnnnnnnnnnnnnnnnnnnnnnnnnnnnnnnnnnnnnnnnnnnnnnnnnnnnnnnnnnnnnnnnnnnnnnnnnnnnnnnnnnnnnnnnnnnnnnnnnnnnnnnnnnnnnnnnnnnnnnnnnnnnnnnnnnnnnnnnnnnnnnnnnnnnnnnnnnnnnnnnnnnnnnnnnnnnnnnnnnnnnnnnnnnnnnnnnnnnnnnnnnnnnnnnnnnnnnnnnnnnnnnnnnnnnnnnnnnnnnnnnnnnnnnnnnnnnnnnnnnnnnnnnnnnnnnnnnnnnnnnnnnnnnnnnnnnnnnnnnnnnnnnnnnnnnnnnnnnnnnnnnnnnnnnnnnnnnnnnnnnnnnnnnnnnnnnnnnnnnnnnnnnnnnnnnnnnnnnnnnnnnnnnnnnnnnnnnnnnnnnnnnnnnnnnnnnnnnnnnnnnnnnnnnnnnnnnnnnnnnnnnnnnnnnnnnnnnnnnnnnnnnnnnnnnnnnnnnnnnnnnnnnnnnnnnnnnnnnnnnnnnnnnnnnnnnnnnnnnnnnnnnnnnnnnnnnnnnnnnnnnnnnnnnnnnnnnnnnnnnnnnnnnnnnnnnnnnnnnnnnnnnnnnnnnnnnnnnnnnnnnnnnnnnnnnnnnnnnnnnnnnnnnnnnnnnnnnnnnnnnnnnnnnnnnnnnnnnnnnnnnnnnnnnnnnnnnnnnnnnnnnnnnnnnnnnnnnnnnnnnnnnnnnnnnnnnnnnnnnnnnnnnnnnnnnnnnnnnnnnnnnnnnnnnnnnnnnnnnnnnnnnnnnnnnnnnnnnnnnnnnnnnnnnnnnnnnnnnnnnnnnnnnnnnnnnnnnnnnnnnnnnnnnnnnnnnnnnnnnnnnnnnnnnnnnnnnnnnnnnnnnnnnnnnnnnnnnnnnnnnnnnnnnnnnnnnnnnnnnnnnnnnnnnnnnnnnnnnnnnnnnnnnnnnnnnnnnnnnnnnnnnnnnnnnnnnnnnnnnnnnnnnnnnnnnnnnnnnnnnnnnnnnnnnnnnnnnnnnnnnnnnnnnnnnnnnnnnnnnnnnnnnnnnnnnnnnnnnnnnnnnnnnnnnnnnnnnnnnnnnnnnnnnnnnnnnnnnnnnnnnnnnnnnnnnnnnnnnnnnnnnnnnnnnnnnnnnnnnnnnnnnnnnnnnnnnnnnnnnnnnnnnnnnnnnnnnnnnnnnnnnnnnnnnnnnnnnnnnnnnnnnnnnnnnnnnnnnnnnnnnnnnnnnnnnnnnnnnnnnnnnnnnnnnnnnnnnnnnnnnnnnnnnnnnnnnnnnnnnnnnnnnnnnnnnnnnnnnnnnnnnnnnnnnnnnnnnnnnnnnnnnnnnnnnnnnnnnnnnnnnnnnnnnnnnnnnnnnnnnnnnnnnnnnnnnnnnnnnnnnnnnnnnnnnnnnnnnnnnnnnnnnnnnnnnnnnnnnnnnnnnnnnnnnnnnnnnnnnnnnnnnnnnnnnnnnnnnnnnnnnnnnnnnnnnnnnnnnnnnnnnnnnnnnnnnnnnnnnnnnnnnnnnnnnnnnnnnnnnnnnnnnnnnnnnnnnnnnnnnnnnnnnnnnnnnnnnnnnnnnnnnnnnnnnnnnnnnnnnnnnnnnnnnnnnnnnnnnnnnnnnnnnnnnnnnnnnnnnnnnnnnnnnnnnnnnnnnnnnnnnnnnnnnnnnnnnnnnnnnnnnnnnnnnnnnnnnnnnnnnnnnnnnnnnnnnnnnnnnnnnnnnnnnnnnnnnnnnnnnnnnnnnnnnnnnnnnnnnnnnnnnnnnnnnnnnnnnnnnnnnnnnnnnnnnnnnnnnnnnnnnnnnnnnnnnnnnnnnnnnnnnnnnnnnnnnnnnnnnnnnnnnnnnnnnnnnnnnnnnnnnnnnnnnnnnnnnnnnnnnnnnnnnnnnnnnnnnnnnnnnnnnnnnnnnnnnnnnnnnnnnnnnnnnnnnnnnnnnnnnnnnnnnnnnnnnnnnnnnnnnnnnnnnnnnnnnnnnnnnnnnnnnnnnnnnnnnnnnnnnnnnnnnnnnnnnnnnnnnnnnnnnnnnnnnnnnnnnnnnnnnnnnnnnnnnnnnnnnnnnnnnnnnnnnnnnnnnnnnnnnnnnnnnnnnnnnnnnnnnnnnnnnnnnnnnnnnnnnnnnnnnnnnnnnnnnnnnnnnnnnnnnnnnnnnnnnnnnnnnnnnnnnnnnnnnnnnnnnnnnnnnnnnnnnnnnnnnnnnnnnnnnnnnnnnnnnnnnnnnnnnnnnnnnnnnnnnnnnnnnnnnnnnnnnnnnnnnnnnnnnnnnnnnnnnnnnnnnnnnnnnnnnnnnnnnnnnnnnnnnnnnnnnnnnnnnnnnnnnnnnnnnnnnnnnnnnnnnnnnnnnnnnnnnnnnnnnnnnnnnnnnnnnnnnnnnnnnnnnnnnnnnnnnnnnnnnnnnnnnnnnnnnnnnnnnnnnnnnnnnnnnnnnnnnnnnnnnnnnnnnnnnnnnnnnnnnnnnnnnnnnnnnnnnnnnnnnnnnnnnnnnnnnnnnnnnnnnnnnnnnnnnnnnnnnnnnnnnnnnnnnnnnnnnnnnnnnnnnnnnnnnnnnnnnnnnnnnnnnnnnnnnnnnnnnnnnnnnnnnnnnnnnnnnnnnnnnnnnnnnnnnnnnnnnnnnnnnnnnnnnnnnnnnnnnnnnnnnnnnnnnnnnnnnnnnnnnnnnnnnnnnnnnnnnnnnnnnnnnnnnnnnnnnnnnnnnnnnnnnnnnnnnnnnnnnnnnnnnnnnnnnnnnnnnnnnnnnnnnnnnnnnnnnnnnnnnnnnnnnnnnnnnnnnnnnnnnnnnnnnnnnnnnnnnnnnnnnnnnnnnnnnnnnnnnnnnnnnnnnnnnnnnnnnnnnnnnnnnnnnnnnnnnnnnnnnnnnnnnnnnnnnnnnnnnnnnnnnnnnnnnnnnnnnnnnnnnnnnnnnnnnnnnnnnnnnnnnnnnnnnnnnnnnnnnnnnnnnnnnnnnnnnnnnnnnnnnnnnnnnnnnnnnnnnnnnnnnnnnnnnnnnnnnnnnnnnnnnnnnnnnnnnnnnnnnnnnnnnnnnnnnnnnnnnnnnnnnnnnnnnnnnnnnnnnnnnnnnnnnnnnnnnnnnnnnnnnnnnnnnnnnnnnnnnnnnnnnnnnnnnnnnnnnnnnnnnnnnnnnnnnnnnnnnnnnnnnnnnnnnnnnnnnnnnnnnnnnnnnnnnnnnnnnnnnnnnnnnnnnnnnnnnnnnnnnnnnnnnnnnnnnnnnnnnnnnnnnnnnnnnnnnnnnnnnnnnnnnnnnnnnnnnnnnnnnnnnnnnnnnnnnnnnnnnnnnnnnnnnnnnnnnnnnnnnnnnnnnnnnnnnnnnnnnnnnnnnnnnnnnnnnnnnnnnnnnnnnnnnnnnnnnnnnnnnnnnnnnnnnnnnnnnnnnnnnnnnnnnnnnnnnnnnnnnnnnnnnnnnnnnnnnnnnnnnnnnnnnnnnnnnnnnnnnnnnnnnnnnnnnnnnnnnnnnnnnnnnnnnnnnnnnnnnnnnnnnnnnnnnnnnnnnnnnnnnnnnnnnnnnnnnnnnnnnnnnnnnnnnnnnnnnnnnnnnnnnnnnnnnnnnnnnnnnnnnnnnnnnnnnnnnnnnnnnnnnnnnnnnnnnnnnnnnnnnnnnnnnnnnnnnnnnnnnnnnnnnnnnnnnnnnnnnnnnnnnnnnnnnnnnnnnnnnnnnnnnnnnnnnnnnnnnnnnnnnnnnnnnnnnnnnnnnnnnnnnnnnnnnnnnnnnnnnnnnnnnnnnnnnnnnnnnnnnnnnnnnnnnnnnnnnnnnnnnnnnnnnnnnnnnnnnnnnnnnnnnnnnnnnnnnnnnnnnnnnnnnnnnnnnnnnnnnnnnnnnnnnnnnnnnnnnnnnnnnnnnnnnnnnnnnnnnnnnnnnnnnnnnnnnnnnnnnnnnnnnnnnnnnnnnnnnnnnnnnnnnnnnnnnnnnnnnnnnnnnnnnnnnnnnnnnnnnnnnnnnnnnnnnnnnnnnnnnnnnnnnnnnnnnnnnnnnnnnnnnnnnnnnnnnnnnnnnnnnnnnnnnnnnnnnnnnnnnnnnnnnnnnnnnnnnnnnnnnnnnnnnnnnnnnnnnnnnnnnnnnnnnnnnnnnnnnnnnnnnnnnnnnnnnnnnnnnnnnnnnnnnnnnnnnnnnnnnnnnnnnnnnnnnnnnnnnnnnnnnnnnnnnnnnnnnnnnnnnnnnnnnnnnnnnnnnnnnnnnnnnnnnnnnnnnnnnnnnnnnnnnnnnnnnnnnnnnnnnnnnnnnnnnnnnnnnnnnnnnnnnnnnnnnnnnnnnnnnnnnnnnnnnnnnnnnnnnnnnnnnnnnnnnnnnnnnnnnnnnnnnnnnnnnnnnnnnnnnnnnnnnnnnnnnnnnnnnnnnnnnnnnnnnnnnnnnnnnnnnnnnnnnnnnnnnnnnnnnnnnnnnnnnnnnnnnnnnnnnnnnnnnnnnnnnnnnnnnnnnnnnnnnnnnnnnnnnnnnnnnnnnnnnnnnnnnnnnnnnnnnnnnnnnnnnnnnnnnnnnnnnnnnnnnnnnnnnnnnnnnnnnnnnnnnnnnnnnnnnnnnnnnnnnnnnnnnnnnnnnnnnnnnnnnnnnnnnnnnnnnnnnnnnnnnnnnnnnnnnnnnnnnnnnnnnnnnnnnnnnnnnnnnnnnnnnnnnnnnnnnnnnnnnnnnnnnnnnnnnnnnnnnnnnnnnnnnnnnnnnnnnnnnnnnnnnnnnnnnnnnnnnnnnnnnnnnnnnnnnnnnnnnnnnnnnnnnnnnnnnnnnnnnnnnnnnnnnnnnnnnnnnnnnnnnnnnnnnnnnnnnnnnnnnnnnnnnnnnnnnnnnnnnnnnnnnnnnnnnnnnnnnnnnnnnnnnnnnnnnnnnnnnnnnnnnnnnnnnnnnnnnnnnnnnnnnnnnnnnnnnnnnnnnnnnnnnnnnnnnnnnnnnnnnnnnnnnnnnnnnnnnnnnnnnnnnnnnnnnnnnnnnnnnnnnnnnnnnnnnnnnnnnnnnnnnnnnnnnnnnnnnnnnnnnnnnnnnnnnnnnnnnnnnnnnnnnnnnnnnnnnnnnnnnnnnnnnnnnnnnnnnnnnnnnnnnnnnnnnnnnnnnnnnnnnnnnnnnnnnnnnnnnnnnnnnnnnnnnnnnnnnnnnnnnnnnnnnnnnnnnnnnnnnnnnnnnnnnnnnnnnnnnnnnnnnnnnnnnnnnnnnnnnnnnnnnnnnnnnnnnnnnnnnnnnnnnnnnnnnnnnnnnnnnnnnnnnnnnnnnnnnnnnnnnnnnnnnnnnnnnnnnnnnnnnnnnnnnnnnnnnnnnnnnnnnnnnnnnnnnnnnnnnnnnnnnnnnnnnnnnnnnnnnnnnnnnnnnnnnnnnnnnnnnnnnnnnnnnnnnnnnnnnnnnnnnnnnnnnnnnnnnnnnnnnnnnnnnnnnnnnnnnnnnnnnnnnnnnnnnnnnnnnnnnnnnnnnnnnnnnnnnnnnnnnnnnnnnnnnnnnnnnnnnnnnnnnnnnnnnnnnnnnnnnnnnnnnnnnnnnnnnnnnnnnnnnnnnnnnnnnnnnnnnnnnnnnnnnnnnnnnnnnnnnnnnnnnnnnnnnnnnnnnnnnnnnnnnnnnnnnnnnnnnnnnnnnnnnnnnnnnnnnnnnnnnnnnnnnnnnnnnnnnnnnnnnnnnnnnnnnnnnnnnnnnnnnnnnnnnnnnnnnnnnnnnnnnnnnnnnnnnnnnnnnnnnnnnnnnnnnnnnnnnnnnnnnnnnnnnnnnnnnnnnnnnnnnnnnnnnnnnnnnnnnnnnnnnnnnnnnnnnnnnnnnnnnnnnnnnnnnnnnnnnnnnnnnnnnnnnnnnnnnnnnnnnnnnnnnnnnnnnnnnnnnnnnnnnnnnnnnnnnnnnnnnnnnnnnnnnnnnnnnnnnnnnnnnnnnnnnnnnnnnnnnnnnnnnnnnnnnnnnnnnnnnnnnnnnnnnnnnnnnnnnnnnnnnnnnnnnnnnnnnnnnnnnnnnnnnnnnnnnnnnnnnnnnnnnnnnnnnnnnnnnnnnnnnnnnnnnnnnnnnnnnnnnnnnnnnnnnnnnnnnnnnnnnnnnnnnnnnnnnnnnnnnnnnnnnnnnnnnnnnnnnnnnnnnnnnnnnnnnnnnnnnnnnnnnnnnnnnnnnnnnnnnnnnnnnnnnnnnnnnnnnnnnnnnnnnnnnnnnnnnnnnnnnnnnnnnnnnnnnnnnnnnnnnnnnnnnnnnnnnnnnnnnnnnnnnnnnnnnnnnnnnnnnnnnnnnnnnnnnnnnnnnnnnnnnnnnnnnnnnnnnnnnnnnnnnnnnnnnnnnnnnnnnnnnnnnnnnnnnnnnnnnnnnnnnnnnnnnnnnnnnnnnnnnnnnnnnnnnnnnnnnnnnnnnnnnnnnnnnnnnnnnnnnnnnnnnnnnnnnnnnnnnnnnnnnnnnnnnnnnnnnnnnnnnnnnnnnnnnnnnnnnnnnnnnnnnnnnnnnnnnnnnnnnnnnnnnnnnnnnnnnnnnnnnnnnnnnnnnnnnnnnnnnnnnnnnnnnnnnnnnnnnnnnnnnnnnnnnnnnnnnnnnnnnnnnnnnnnnnnnnnnnnnnnnnnnnnnnnnnnnnnnnnnnnnnnnnnnnnnnnnnnnnnnnnnnnnnnnnnnnnnnnnnnnnnnnnnnnnnnnnnnnnnnnnnnnnnnnnnnnnnnnnnnnnnnnnnnnnnnnnnnnnnnnnnnnnnnnnnnnnnnnnnnnnnnnnnnnnnnnnnnnnnnnnnnnnnnnnnnnnnnnnnnnnnnnnnnnnnnnnnnnnnnnnnnnnnnnnnnnnnnnnnnnnnnnnnnnnnnnnnnnnnnnnnnnnnnnnnnnnnnnnnnnnnnnnnnnnnnnnnnnnnnnnnnnnnnnnnnnnnnnnnnnnnnnnnnnnnnnnnnnnnnnnnnnnnnnnnnnnnnnnnnnnnnnnnnnnnnnnnnnnnnnnnnnnnnnnnnnnnnnnnnnnnnnnnnnnnnnnnnnnnnnnnnnnnnnnnnnnnnnnnnnnnnnnnnnnnnnnnnnnnnnnnnnnnnnnnnnnnnnnnnnnnnnnnnnnnnnnnnnnnnnnnnnnnnnnnnnnnnnnnnnnnnnnnnnnnnnnnnnnnnnnnnnnnnnnnnnnnnnnnnnnnnnnnnnnnnnnnnnnnnnnnnnnnnnnnnnnnnnnnnnnnnnnnnnnnnnnnnnnnnnnnnnnnnnnnnnnnnnnnnnnnnnnnnnnnnnnnnnnnnnnnnnnnnnnnnnnnnnnnnnnnnnnnnnnnnnnnnnnnnnnnnnnnnnnnnnnnnnnnnnnnnnnnnnnnnnnnnnnnnnnnnnnnnnnnnnnnnnnnnnnnnnnnnnnnnnnnnnnnnnnnnnnnnnnnnnnnnnnnnnnnnnnnnnnnnnnnnnnnnnnnnnnnnnnnnnnnnnnnnnnnnnnnnnnnnnnnnnnnnnnnnnnnnnnnnnnnnnnnnnnnnnnnnnnnnnnnnnnnnnnnnnnnnnnnnnnnnnnnnnnnnnnnnnnnnnnnnnnnnnnnnnnnnnnnnnnnnnnnnnnnnnnnnnnnnnnnnnnnnnnnnnnnnnnnnnnnnnnnnnnnnnnnnnnnnnnnnnnnnnnnnnnnnnnnnnnnnnnnnnnnnnnnnnnnnnnnnnnnnnnnnnnnnnnnnnnnnnnnnnnnnnnnnnnnnnnnnnnnnnnnnnnnnnnnnnnnnnnnnnnnnnnnnnnnnnnnnnnnnnnnnnnnnnnnnnnnnnnnnnnnnnnnnnnnnnnnnnnnnnnnnnnnnnnnnnnnnnnnnnnnnnnnnnnnnnnnnnnnnnnnnnnnnnnnnnnnnnnnnnnnnnnnnnnnnnnnnnnnnnnnnnnnnnnnnnnnnnnnnnnnnnnnnnnnnnnnnnnnnnnnnnnnnnnnnnnnnnnnnnnnnnnnnnnnnnnnnnnnnnnnnnnnnnnnnnnnnnnnnnnnnnnnnnnnnnnnnnnnnnnnnnnnnnnnnnnnnnnnnnnnnnnnnnnnnnnnnnnnnnnnnnnnnnnnnnnnnnnnnnnnnnnnnnnnnnnnnnnnnnnnnnnnnnnnnnnnnnnnnnnnnnnnnnnnnnnnnnnnnnnnnnnnnnnnnnnnnnnnnnnnnnnnnnnnnnnnnnnnnnnnnnnnnnnnnnnnnnnnnnnnnnnnnnnnnnnnnnnnnnnnnnnnnnnnnnnnnnnnnnnnnnnnnnnnnnnnnnnnnnnnnnnnnnnnnnnnnnnnnnnnnnnnnnnnnnnnnnnnnnnnnnnnnnnnnnnnnnnnnnnnnnnnnnnnnnnnnnnnnnnnnnnnnnnnnnnnnnnnnnnnnnnnnnnnnnnnnnnnnnnnnnnnnnnnnnnnnnnnnnnnnnnnnnnnnnnnnnnnnnnnnnnnnnnnnnnnnnnnnnnnnnnnnnnnnnnnnnnnnnnnnnnnnnnnnnnnnnnnnnnnnnnnnnnnnnnnnnnnnnnnnnnnnnnnnnnnnnnnnnnnnnnnnnnnnnnnnnnnnnnnnnnnnnnnnnnnnnnnnnnnnnnnnnnnnnnnnnnnnnnnnnnnnnnnnnnnnnnnnnnnnnnnnnnnnnnnnnnnnnnnnnnnnnnnnnnnnnnnnnnnnnnnnnnnnnnnnnnnnnnnnnnnnnnnnnnnnnnnnnnnnnnnnnnnnnnnnnnnnnnnnnnnnnnnnnnnnnnnnnnnnnnnnnnnnnnnnnnnnnnnnnnnnnnnnnnnnnnnnnnnnnnnnnnnnnnnnnnnnnnnnnnnnnnnnnnnnnnnnnnnnnnnnnnnnnnnnnnnnnnnnnnnnnnnnnnnnnnnnnnnnnnnnnnnnnnnnnnnnnnnnnnnnnnnnnnnnnnnnnnnnnnnnnnnnnnnnnnnnnnnnnnnnnnnnnnnnnnnnnnnnnnnnnnnnnnnnnnnnnnnnnnnnnnnnnnnnnnnnnnnnnnnnnnnnnnnnnnnnnnnnnnnnnnnnnnnnnnnnnnnnnnnnnnnnnnnnnnnnnnnnnnnnnnnnnnnnnnnnnnnnnnnnnnnnnnnnnnnnnnnnnnnnnnnnnnnnnnnnnnnnnnnnnnnnnnnnnnnnnnnnnnnnnnnnnnnnnnnnnnnnnnnnnnnnnnnnnnnnnnnnnnnnnnnnnnnnnnnnnnnnnnnnnnnnnnnnnnnnnnnnnnnnnnnnnnnnnnnnnnnnnnnnnnnnnnnnnnnnnnnnnnnnnnnnnnnnnnnnnnnnnnnnnnnnnnnnnnnnnnnnnnnnnnnnnnnnnnnnnnnnnnnnnnnnnnnnnnnnnnnnnnnnnnnnnnnnnnnnnnnnnnnnnnnnnnnnnnnnnnnnnnnnnnnnnnnnnnnnnnnnnnnnnnnnnnnnnnnnnnnnnnnnnnnnnnnnnnnnnnnnnnnnnnnnnnnnnnnnnnnnnnnnnnnnnnnnnnnnnnnnnnnnnnnnnnnnnnnnnnnnnnnnnnnnnnnnnnnnnnnnnnnnnnnnnnnnnnnnnnnnnnnnnnnnnnnnnnnnnnnnnnnnnnnnnnnnnnnnnnnnnnnnnnnnnnnnnnnnnnnnnnnnnnnnnnnnnnnnnnnnnnnnnnnnnnnnnnnnnnnnnnnnnnnnnnnnnnnnnnnnnnnnnnnnnnnnnnnnnnnnnnnnnnnnnnnnnnnnnnnnnnnnnnnnnnnnnnnnnnnnnnnnnnnnnnnnnnnnnnnnnnnnnnnnnnnnnnnnnnnnnnnnnnnnnnnnnnnnnnnnnnnnnnnnnnnnnnnnnnnnnnnnnnnnnnnnnnnnnnnnnnnnnnnnnnnnnnnnnnnnnnnnnnnnnnnnnnnnnnnnnnnnnnnnnnnnnnnnnnnnnnnnnnnnnnnnnnnnnnnnnnnnnnnnnnnnnnnnnnnnnnnnnnnnnnnnnnnnnnnnnnnnnnnnnnnnnnnnnnnnnnnnnnnnnnnnnnnnnnnnnnnnnnnnnnnnnnnnnnnnnnnnnnnnnnnnnnnnnnnnnnnnnnnnnnnnnnnnnnnnnnnnnnnnnnnnnnnnnnnnnnnnnnnnnnnnnnnnnnnnnnnnnnnnnnnnnnnnnnnnnnnnnnnnnnnnnnnnnnnnnnnnnnnnnnnnnnnnnnnnnnnnnnnnnnnnnnnnnnnnnnnnnnnnnnnnnnnnnnnnnnnnnnnnnnnnnnnnnnnnnnnnnnnnnnnnnnnnnnnnnnnnnnnnnnnnnnnnnnnnnnnnnnnnnnnnnnnnnnnnnnnnnnnnnnnnnnnnnnnnnnnnnnnnnnnnnnnnnnnnnnnnnnnnnnnnnnnnnnnnnnnnnnnnnnnnnnnnnnnnnnnnnnnnnnnnnnnnnnnnnnnnnnnnnnnnnnnnnnnnnnnnnnnnnnnnnnnnnnnnnnnnnnnnnnnnnnnnnnnnnnnnnnnnnnnnnnnnnnnnnnnnnnnnnnnnnnnnnnnnnnnnnnnnnnnnnnnnnnnnnnnnnnnnnnnnnnnnnnnnnnnnnnnnnnnnnnnnnnnnnnnnnnnnnnnnnnnnnnnnnnnnnnnnnnnnnnnnnnnnnnnnnnnnnnnnnnnnnnnnnnnnnnnnnnnnnnnnnnnnnnnnnnnnnnnnnnnnnnnnnnnnnnnnnnnnnnnnnnnnnnnnnnnnnnnnnnnnnnnnnnnnnnnnnnnnnnnnnnnnnnnnnnnnnnnnnnnnnnnnnnnnnnnnnnnnnnnnnnnnnnnnnnnnnnnnnnnnnnnnnnnnnnnnnnnnnnnnnnnnnnnnnnnnnnnnnnnnnnnnnnnnnnnnnnnnnnnnnnnnnnnnnnnnnnnnnnnnnnnnnnnnnnnnnnnnnnnnnnnnnnnnnnnnnnnnnnnnnnnnnnnnnnnnnnnnnnnnnnnnnnnnnnnnnnnnnnnnnnnnnnnnnnnnnnnnnnnnnnnnnnnnnnnnnnnnnnnnnnnnnnnnnnnnnnnnnnnnnnnnnnnnnnnnnnnnnnnnnnnnnnnnnnnnnnnnnnnnnnnnnnnnnnnnnnnnnnnnnnnnnnnnnnnnnnnnnnnnnnnnnnnnnnnnnnnnnnnnnnnnnnnnnnnnnnnnnnnnnnnnnnnnnnnnnnnnnnnnnnnnnnnnnnnnnnnnnnnnnnnnnnnnnnnnnnnnnnnnnnnnnnnnnnnnnnnnnnnnnnnnnnnnnnnnnnnnnnnnnnnnnnnnnnnnnnnnnnnnnnnnnnnnnnnnnnnnnnnnnnnnnnnnnnnnnnnnnnnnnnnnnnnnnnnnnnnnnnnnnnnnnnnnnnnnnnnnnnnnnnnnnnnnnnnnnnnnnnnnnnnnnnnnnnnnnnnnnnnnnnnnnnnnnnnnnnnnnnnnnnnnnnnnnnnnnnnnnnnnnnnnnnnnnnnnnnnnnnnnnnnnnnnnnnnnnnnnnnnnnnnnnnnnnnnnnnnnnnnnnnnnnnnnnnnnnnnnnnnnnnnnnnnnnnnnnnnnnnnnnnnnnnnnnnnnnnnnnnnnnnnnnnnnnnnnnnnnnnnnnnnnnnnnnnnnnnnnnnnnnnnnnnnnnnnnnnnnnnnnnnnnnnnnnnnnnnnnnnnnnnnnnnnnnnnnnnnnnnnnnnnnnnnnnnnnnnnnnnnnnnnnnnnnnnnnnnnnnnnnnnnnnnnnnnnnnnnnnnnnnnnnnnnnnnnnnnnnnnnnnnnnnnnnnnnnnnnnnnnnnnnnnnnnnnnnnnnnnnnnnnnnnnnnnnnnnnnnnnnnnnnnnnnnnnnnnnnnnnnnnnnnnnnnnnnnnnnnnnnnnnnnnnnnnnnnnnnnnnnnnnnnnnnnnnnnnnnnnnnnnnnnnnnnnnnnnnnnnnnnnnnnnnnnnnnnnnnnnnnnnnnnnnnnnnnnnnnnnnnnnnnnnnnnnnnnnnnnnnnnnnnnnnnnnnnnnnnnnnnnnnnnnnnnnnnnnnnnnnnnnnnnnnnnnnnnnnnnnnnnnnnnnnnnnnnnnnnnnnnnnnnnnnnnnnnnnnnnnnnnnnnnnnnnnnnnnnnnnnnnnnnnnnnnnnnnnnnnnnnnnnnnnnnnnnnnnnnnnnnnnnnnnnnnnnnnnnnnnnnnnnnnnnnnnnnnnnnnnnnnnnnnnnnnnnnnnnnnnnnnnnnnnnnnnnnnnnnnnnnnnnnnnnnnnnnnnnnnnnnnnnnnnnnnnnnnnnnnnnnnnnnnnnnnnnnnnnnnnnnnnnnnnnnnnnnnnnnnnnnnnnnnnnnnnnnnnnnnnnnnnnnnnnnnnnnnnnnnnnnnnnnnnnnnnnnnnnnnnnnnnnnnnnnnnnnnnnnnnnnnnnnnnnnnnnnnnnnnnnnnnnnnnnnnnnnnnnnnnnnnnnnnnnnnnnnnnnnnnnnnnnnnnnnnnnnnnnnnnnnnnnnnnnnnnnnnnnnnnnnnnnnnnnnnnnnnnnnnnnnnnnnnnnnnnnnnnnnnnnnnnnnnnnnnnnnnnnnnnnnnnnnnnnnnnnnnnnnnnnnnnnnnnnnnnnnnnnnnnnnnnnnnnnnnnnnnnnnnnnnnnnnnnnnnnnnnnnnnnnnnnnnnnnnnnnnnnnnnnnnnnnnnnnnnnnnnnnnnnnnnnnnnnnnnnnnnnnnnnnnnnnnnnnnnnnnnnnnnnnnnnnnnnnnnnnnnnnnnnnnnnnnnnnnnnnnnnnnnnnnnnnnnnnnnnnnnnnnnnnnnnnnnnnnnnnnnnnnnnnnnnnnnnnnnnnnnnnnnnnnnnnnnnnnnnnnnnnnnnnnnnnnnnnnnnnnnnnnnnnnnnnnnnnnnnnnnnnnnnnnnnnnnnnnnnnnnnnnnnnnnnnnnnnnnnnnnnnnnnnnnnnnnnnnnnnnnnnnnnnnnnnnnnnnnnnnnnnnnnnnnnnnnnnnnnnnnnnnnnnnnnnnnnnnnnnnnnnnnnnnnnnnnnnnnnnnnnnnnnnnnnnnnnnnnnnnnnnnnnnnnnnnnnnnnnnnnnnnnnnnnnnnnnnnnnnnnnnnnnnnnnnnnnnnnnnnnnnnnnnnnnnnnnnnnnnnnnnnnnnnnnnnnnnnnnnnnnnnnnnnnnnnnnnnnnnnnnnnnnnnnnnnnnnnnnnnnnnnnnnnnnnnnnnnnnnnnnnnnnnnnnnnnnnnnnnnnnnnnnnnnnnnnnnnnnnnnnnnnnnnnnnnnnnnnnnnnnnnnnnnnnnnnnnnnnnnnnnnnnnnnnnnnnnnnnnnnnnnnnnnnnnnnnnnnnnnnnnnnnnnnnnnnnnnnnnnnnnnnnnnnnnnnnnnnnnnnnnnnnnnnnnnnnnnnnnnnnnnnnnnnnnnnnnnnnnnnnnnnnnnnnnnnnnnnnnnnnnnnnnnnnnnnnnnnnnnnnnnnnnnnnnnnnnnnnnnnnnnnnnnnnnnnnnnnnnnnnnnnnnnnnnnnnnnnnnnnnnnnnnnnnnnnnnnnnnnnnnnnnnnnnnnnnnnnnnnnnnnnnnnnnnnnnnnnnnnnnnnnnnnnnnnnnnnnnnnnnnnnnnnnnnnnnnnnnnnnnnnnnnnnnnnnnnnnnnnnnnnnnnnnnnnnnnnnnnnnnnnnnnnnnnnnnnnnnnnnnnnnnnnnnnnnnnnnnnnnnnnnnnnnnnnnnnnnnnnnnnnnnnnnnnnnnnnnnnnnnnnnnnnnnnnnnnnnnnnnnnnnnnnnnnnnnnnnnnnnnnnnnnnnnnnnnnnnnnnnnnnnnnnnnnnnnnnnnnnnnnnnnnnnnnnnnnnnnnnnnnnnnnnnnnnnnnnnnnnnnnnnnnnnnnnnnnnnnnnnnnnnnnnnnnnnnnnnnnnnnnnnnnnnnnnnnnnnnnnnnnnnnnnnnnnnnnnnnnnnnnnnnnnnnnnnnnnnnnnnnnnnnnnnnnnnnnnnnnnnnnnnnnnnnnnnnnnnnnnnnnnnnnnnnnnnnnnnnnnnnnnnnnnnnnnnnnnnnnnnnnnnnnnnnnnnnnnnnnnnnnnnnnnnnnnnnnnnnnnnnnnnnnnnnnnnnnnnnnnnnnnnnnnnnnnnnnnnnnnnnnnnnnnnnnnnnnnnnnnnnnnnnnnnnnnnnnnnnnnnnnnnnnnnnnnnnnnnnnnnnnnnnnnnnnnnnnnnnnnnnnnnnnnnnnnnnnnnnnnnnnnnnnnnnnnnnnnnnnnnnnnnnnnnnnnnnnnnnnnnnnnnnnnnnnnnnnnnnnnnnnnnnnnnnnnnnnnnnnnnnnnnnnnnnnnnnnnnnnnnnnnnnnnnnnnnnnnnnnnnnnnnnnnnnnnnnnnnnnnnnnnnnnnnnnnnnnnnnnnnnnnnnnnnnnnnnnnnnnnnnnnnnnnnnnnnnnnnnnnnnnnnnnnnnnnnnnnnnnnnnnnnnnnnnnnnnnnnnnnnnnnnnnnnnnnnnnnnnnnnnnnnnnnnnnnnnnnnnnnnnnnnnnnnnnnnnnnnnnnnnnnnnnnnnnnnnnnnnnnnnnnnnnnnnnnnnnnnnnnnnnnnnnnnnnnnnnnnnnnnnnnnnnnnnnnnnnnnnnnnnnnnnnnnnnnnnnnnnnnnnnnnnnnnnnnnnnnnnnnnnnnnnnnnnnnnnnnnnnnnnnnnnnnnnnnnnnnnnnnnnnnnnnnnnnnnnnnnnnnnnnnnnnnnnnnnnnnnnnnnnnnnnnnnnnnnnnnnnnnnnnnnnnnnnnnnnnnnnnnnnnnnnnnnnnnnnnnnnnnnnnnnnnnnnnnnnnnnnnnnnnnnnnnnnnnnnnnnnnnnnnnnnnnnnnnnnnnnnnnnnnnnnnnnnnnnnnnnnnnnnnnnnnnnnnnnnnnnnnnnnnnnnnnnnnnnnnnnnnnnnnnnnnnnnnnnnnnnnnnnnnnnnnnnnnnnnnnnnnnnnnnnnnnnnnnnnnnnnnnnnnnnnnnnnnnnnnnnnnnnnnnnnnnnnnnnnnnnnnnnnnnnnnnnnnnnnnnnnnnnnnnnnnnnnnnnnnnnnnnnnnnnnnnnnnnnnnnnnnnnnnnnnnnnnnnnnnnnnnnnnnnnnnnnnnnnnnnnnnnnnnnnnnnnnnnnnnnnnnnnnnnnnnnnnnnnnnnnnnnnnnnnnnnnnnnnnnnnnnnnnnnnnnnnnnnnnnnnnnnnnnnnnnnnnnnnnnnnnnnnnnnnnnnnnnnnnnnnnnnnnnnnnnnnnnnnnnnnnnnnnnnnnnnnnnnnnnnnnnnnnnnnnnnnnnnnnnnnnnnnnnnnnnnnnnnnnnnnnnnnnnnnnnnnnnnnnnnnnnnnnnnnnnnnnnnnnnnnnnnnnnnnnnnnnnnnnnnnnnnnnnnnnnnnnnnnnnnnnnnnnnnnnnnnnnnnnnnnnnnnnnnnnnnnnnnnnnnnnnnnnnnnnnnnnnnnnnnnnnnnnnnnnnnnnnnnnnnnnnnnnnnnnnnnnnnnnnnnnnnnnnnnnnnnnnnnnnnnnnnnnnnnnnnnnnnnnnnnnnnnnnnnnnnnnnnnnnnnnnnnnnnnnnnnnnnnnnnnnnnnnnnnnnnnnnnnnnnnnnnnnnnnnnnnnnnnnnnnnnnnnnnnnnnnnnnnnnnnnnnnnnnnnnnnnnnnnnnnnnnnnnnnnnnnnnnnnnnnnnnnnnnnnnnnnnnnnnnnnnnnnnnnnnnnnnnnnnnnnnnnnnnnnnnnnnnnnnnnnnnnnnnnnnnnnnnnnnnnnnnnnnnnnnnnnnnnnnnnnnnnnnnnnnnnnnnnnnnnnnnnnnnnnnnnnnnnnnnnnnnnnnnnnnnnnnnnnnnnnnnnnnnnnnnnnnnnnnnnnnnnnnnnnnnnnnnnnnnnnnnnnnnnnnnnnnnnnnnnnnnnnnnnnnnnnnnnnnnnnnnnnnnnnnnnnnnnnnnnnnnnnnnnnnnnnnnnnnnnnnnnnnnnnnnnnnnnnnnnnnnnnnnnnnnnnnnnnnnnnnnnnnnnnnnnnnnnnnnnnnnnnnnnnnnnnnnnnnnnnnnnnnnnnnnnnnnnnnnnnnnnnnnnnnnnnnnnnnnnnnnnnnnnnnnnnnnnnnnnnnnnnnnnnnnnnnnnnnnnnnnnnnnnnnnnnnnnnnnnnnnnnnnnnnnnnnnnnnnnnnnnnnnnnnnnnnnnnnnnnnnnnnnnnnnnnnnnnnnnnnnnnnnnnnnnnnnnnnnnnnnnnnnnnnnnnnnnnnnnnnnnnnnnnnnnnnnnnnnnnnnnnnnnnnnnnnnnnnnnnnnnnnnnnnnnnnnnnnnnnnnnnnnnnnnnnnnnnnnnnnnnnnnnnnnnnnnnnnnnnnnnnnnnnnnnnnnnnnnnnnnnnnnnnnnnnnnnnnnnnnnnnnnnnnnnnnnnnnnnnnnnnnnnnnnnnnnnnnnnnnnnnnnnnnnnnnnnnnnnnnnnnnnnnnnnnnnnnnnnnnnnnnnnnnnnnnnnnnnnnnnnnnnnnnnnnnnnnnnnnnnnnnnnnnnnnnnnnnnnnnnnnnnnnnnnnnnnnnnnnnnnnnnnnnnnnnnnnnnnnnnnnnnnnnnnnnnnnnnnnnnnnnnnnnnnnnnnnnnnnnnnnnnnnnnnnnnnnnnnnnnnnnnnnnnnnnnnnnnnnnnnnnnnnnnnnnnnnnnnnnnnnnnnnnnnnnnnnnnnnnnnnnnnnnnnnnnnnnnnnnnnnnnnnnnnnnnnnnnnnnnnnnnnnnnnnnnnnnnnnnnnnnnnnnnnnnnnnnnnnnnnnnnnnnnnnnnnnnnnnnnnnnnnnnnnnnnnnnnnnnnnnnnnnnnnnnnnnnnnnnnnnnnnnnnnnnnnnnnnnnnnnnnnnnnnnnnnnnnnnnnnnnnnnnnnnnnnnnnnnnnnnnnnnnnnnnnnnnnnnnnnnnnnnnnnnnnnnnnnnnnnnnnnnnnnnnnnnnnnnnnnnnnnnnnnnnnnnnnnnnnnnnnnnnnnnnnnnnnnnnnnnnnnnnnnnnnnnnnnnnnnnnnnnnnnnnnnnnnnnnnnnnnnnnnnnnnnnnnnnnnnnnnnnnnnnnnnnnnnnnnnnnnnnnnnnnnnnnnnnnnnnnnnnnnnnnnnnnnnnnnnnnnnnnnnnnnnnnnnnnnnnnnnnnnnnnnnnnnnnnnnnnnnnnnnnnnnnnnnnnnnnnnnnnnnnnnnnnnnnnnnnnnnnnnnnnnnnnnnnnnnnnnnnnnnnnnnnnnnnnnnnnnnnnnnnnnnnnnnnnnnnnnnnnnnnnnnnnnnnnnnnnnnnnnnnnnnnnnnnnnnnnnnnnnnnnnnnnnnnnnnnnnnnnnnnnnnnnnnnnnnnnnnnnnnnnnnnnnnnnnnnnnnnnnnnnnnnnnnnnnnnnnnnnnnnnnnnnnnnnnnnnnnnnnnnnnnnnnnnnnnnnnnnnnnnnnnnnnnnnnnnnnnnnnnnnnnnnnnnnnnnnnnnnnnnnnnnnnnnnnnnnnnnnnnnnnnnnnnnnnnnnnnnnnnnnnnnnnnnnnnnnnnnnnnnnnnnnnnnnnnnnnnnnnnnnnnnnnnnnnnnnnnnnnnnnnnnnnnnnnnnnnnnnnnnnnnnnnnnnnnnnnnnnnnnnnnnnnnnnnnnnnnnnnnnnnnnnnnnnnnnnnnnnnnnnnnnnnnnnnnnnnnnnnnnnnnnnnnnnnnnnnnnnnnnnnnnnnnnnnnnnnnnnnnnnnnnnnnnnnnnnnnnnnnnnnnnnnnnnnnnnnnnnnnnnnnnnnnnnnnnnnnnnnnnnnnnnnnnnnnnnnnnnnnnnnnnnnnnnnnnnnnnnnnnnnnnnnnnnnnnnnnnnnnnnnnnnnnnnnnnnnnnnnnnnnnnnnnnnnnnnnnnnnnnnnnnnnnnnnnnnnnnnnnnnnnnnnnnnnnnnnnnnnnnnnnnnnnnnnnnnnnnnnnnnnnnnnnnnnnnnnnnnnnnnnnnnnnnnnnnnnnnnnnnnnnnnnnnnnnnnnnnnnnnnnnnnnnnnnnnnnnnnnnnnnnnnnnnnnnnnnnnnnnnnnnnnnnnnnnnnnnnnnnnnnnnnnnnnnnnnnnnnnnnnnnnnnnnnnnnnnnnnnnnnnnnnnnnnnnnnnnnnnnnnnnnnnnnnnnnnnnnnnnnnnnnnnnnnnnnnnnnnnnnnnnnnnnnnnnnnnnnnnnnnnnnnnnnnnnnnnnnnnnnnnnnnnnnnnnnnnnnnnnnnnnnnnnnnnnnnnnnnnnnnnnnnnnnnnnnnnnnnnnnnnnnnnnnnnnnnnnnnnnnnnnnnnnnnnnnnnnnnnnnnnnnnnnnnnnnnnnnnnnnnnnnnnnnnnnnnnnnnnnnnnnnnnnnnnnnnnnnnnnnnnnnnnnnnnnnnnnnnnnnnnnnnnnnnnnnnnnnnnnnnnnnnnnnnnnnnnnnnnnnnnnnnnnnnnnnnnnnnnnnnnnnnnnnnnnnnnnnnnnnnnnnnnnnnnnnnnnnnnnnnnnnnnnnnnnnnnnnnnnnnnnnnnnnnnnnnnnnnnnnnnnnnnnnnnnnnnnnnnnnnnnnnnnnnnnnnnnnnnnnnnnnnnnnnnnnnnnnnnnnnnnnnnnnnnnnnnnnnnnnnnnnnnnnnnnnnnnnnnnnnnnnnnnnnnnnnnnnnnnnnnnnnnnnnnnnnnnnnnnnnnnnnnnnnnnnnnnnnnnnnnnnnnnnnnnnnnnnnnnnnnnnnnnnnnnnnnnnnnnnnnnnnnnnnnnnnnnnnnnnnnnnnnnnnnnnnnnnnnnnnnnnnnnnnnnnnnnnnnnnnnnnnnnnnnnnnnnnnnnnnnnnnnnnnnnnnnnnnnnnnnnnnnnnnnnnnnnnnnnnnnnnnnnnnnnnnnnnnnnnnnnnnnnnnnnnnnnnnnnnnnnnnnnnnnnnnnnnnnnnnnnnnnnnnnnnnnnnnnnnnnnnnnnnnnnnnnnnnnnnnnnnnnnnnnnnnnnnnnnnnnnnnnnnnnnnnnnnnnnnnnnnnnnnnnnnnnnnnnnnnnnnnnnnnnnnnnnnnnnnnnnnnnnnnnnnnnnnnnnnnnnnnnnnnnnnnnnnnnnnnnnnnnnnnnnnnnnnnnnnnnnnnnnnnnnnnnnnnnnnnnnnnnnnnnnnnnnnnnnnnnnnnnnnnnnnnnnnnnnnnnnnnnnnnnnnnnnnnnnnnnnnnnnnnnnnnnnnnnnnnnnnnnnnnnnnnnnnnnnnnnnnnnnnnnnnnnnnnnnnnnnnnnnnnnnnnnnnnnnnnnnnnnnnnnnnnnnnnnnnnnnnnnnnnnnnnnnnnnnnnnnnnnnnnnnnnnnnnnnnnnnnnnnnnnnnnnnnnnnnnnnnnnnnnnnnnnnnnnnnnnnnnnnnnnnnnnnnnnnnnnnnnnnnnnnnnnnnnnnnnnnnnnnnnnnnnnnnnnnnnnnnnnnnnnnnnnnnnnnnnnnnnnnnnnnnnnnnnnnnnnnnnnnnnnnnnnnnnnnnnnnnnnnnnnnnnnnnnnnnnnnnnnnnnnnnnnnnnnnnnnnnnnnnnnnnnnnnnnnnnnnnnnnnnnnnnnnnnnnnnnnnnnnnnnnnnnnnnnnnnnnnnnnnnnnnnnnnnnnnnnnnnnnnnnnnnnnnnnnnnnnnnnnnnnnnnnnnnnnnnnnnnnnnnnnnnnnnnnnnnnnnnnnnnnnnnnnnnnnnnnnnnnnnnnnnnnnnnnnnnnnnnnnnnnnnnnnnnnnnnnnnnnnnnnnnnnnnnnnnnnnnnnnnnnnnnnnnnnnnnnnnnnnnnnnnnnnnnnnnnnnnnnnnnnnnnnnnnnnnnnnnnnnnnnnnnnnnnnnnnnnnnnnnnnnnnnnnnnnnnnnnnnnnnnnnnnnnnnnnnnnnnnnnnnnnnnnnnnnnnnnnnnnnnnnnnnnnnnnnnnnnnnnnnnnnnnnnnnnnnnnnnnnnnnnnnnnnnnnnnnnnnnnnnnnnnnnnnnnnnnnnnnnnnnnnnnnnnnnnnnnnnnnnnnnnnnnnnnnnnnnnnnnnnnnnnnnnnnnnnnnnnnnnnnnnnnnnnnnnnnnnnnnnnnnnnnnnnnnnnnnnnnnnnnnnnnnnnnnnnnnnnnnnnnnnnnnnnnnnnnnnnnnnnnnnnnnnnnnnnnnnnnnnnnnnnnnnnnnnnnnnnnnnnnnnnnnnnnnnnnnnnnnnnnnnnnnnnnnnnnnnnnnnnnnnnnnnnnnnnnnnnnnnnnnnnnnnnnnnnnnnnnnnnnnnnnnnnnnnnnnnnnnnnnnnnnnnnnnnnnnnnnnnnnnnnnnnnnnnnnnnnnnnnnnnnnnnnnnnnnnnnnnnnnnnnnnnnnnnnnnnnnnnnnnnnnnnnnnnnnnnnnnnnnnnnnnnnnnnnnnnnnnnnnnnnnnnnnnnnnnnnnnnnnnnnnnnnnnnnnnnnnnnnnnnnnnnnnnnnnnnnnnnnnnnnnnnnnnnnnnnnnnnnnnnnnnnnnnnnnnnnnnnnnnnnnnnnnnnnnnnnnnnnnnnnnnnnnnnnnnnnnnnnnnnnnnnnnnnnnnnnnnnnnnnnnnnnnnnnnnnnnnnnnnnnnnnnnnnnnnnnnnnnnnnnnnnnnnnnnnnnnnnnnnnnnnnnnnnnnnnnnnnnnnnnnnnnnnnnnnnnnnnnnnnnnnnnnnnnnnnnnnnnnnnnnnnnnnnnnnnnnnnnnnnnnnnnnnnnnnnnnnnnnnnnnnnnnnnnnnnnnnnnnnnnnnnnnnnnnnnnnnnnnnnnnnnnnnnnnnnnnnnnnnnnnnnnnnnnnnnnnnnnnnnnnnnnnnnnnnnnnnnnnnnnnnnnnnnnnnnnnnnnnnnnnnnnnnnnnnnnnnnnnnnnnnnnnnnnnnnnnnnnnnnnnnnnnnnnnnnnnnnnnnnnnnnnnnnnnnnnnnnnnnnnnnnnnnnnnnnnnnnnnnnnnnnnnnnnnnnnnnnnnnnnnnnnnnnnnnnnnnnnnnnnnnnnnnnnnnnnnnnnnnnnnnnnnnnnnnnnnnnnnnnnnnnnnnnnnnnnnnnnnnnnnnnnnnnnnnnnnnnnnnnnnnnnnnnnnnnnnnnnnnnnnnnnnnnnnnnnnnnnnnnnnnnnnnnnnnnnnnnnnnnnnnnnnnnnnnnnnnnnnnnnnnnnnnnnnnnnnnnnnnnnnnnnnnnnnnnnnnnnnnnnnnnnnnnnnnnnnnnnnnnnnnnnnnnnnnnnnnnnnnnnnnnnnnnnnnnnnnnnnnnnnnnnnnnnnnnnnnnnnnnnnnnnnnnnnnnnnnnnnnnnnnnnnnnnnnnnnnnnnnnnnnnnnnnnnnnnnnnnnnnnnnnnnnnnnnnnnnnnnnnnnnnnnnnnnnnnnnnnnnnnnnnnnnnnnnnnnnnnnnnnnnnnnnnnnnnnnnnnnnnnnnnnnnnnnnnnnnnnnnnnnnnnnnnnnnnnnnnnnnnnnnnnnnnnnnnnnnnnnnnnnnnnnnnnnnnnnnnnnnnnnnnnnnnnnnnnnnnnnnnnnnnnnnnnnnnnnnnnnnnnnnnnnnnnnnnnnnnnnnnnnnnnnnnnnnnnnnnnnnnnnnnnnnnnnnnnnnnnnnnnnnnnnnnnnnnnnnnnnnnnnnnnnnnnnnnnnnnnnnnnnnnnnnnnnnnnnnnnnnnnnnnnnnnnnnnnnnnnnnnnnnnnnnnnnnnnnnnnnnnnnnnnnnnnnnnnnnnnnnnnnnnnnnnnnnnnnnnnnnnnnnnnnnnnnnnnnnnnnnnnnnnnnnnnnnnnnnnnnnnnnnnnnnnnnnnnnnnnnnnnnnnnnnnnnnnnnnnnnnnnnnnnnnnnnnnnnnnnnnnnnnnnnnnnnnnnnnnnnnnnnnnnnnnnnnnnnnnnnnnnnnnnnnnnnnnnnnnnnnnnnnnnnnnnnnnnnnnnnnnnnnnnnnnnnnnnnnnnnnnnnnnnnnnnnnnnnnnnnnnnnnnnnnnnnnnnnnnnnnnnnnnnnnnnnnnnnnnnnnnnnnnnnnnnnnnnnnnnnnnnnnnnnnnnnnnnnnnnnnnnnnnnnnnnnnnnnnnnnnnnnnnnnnnnnnnnnnnnnnnnnnnnnnnnnnnnnnnnnnnnnnnnnnnnnnnnnnnnnnnnnnnnnnnnnnnnnnnnnnnnnnnnnnnnnnnnnnnnnnnnnnnnnnnnnnnnnnnnnnnnnnnnnnnnnnnnnnnnnnnnnnnnnnnnnnnnnnnnnnnnnnnnnnnnnnnnnnnnnnnnnnnnnnnnnnnnnnnnnnnnnnnnnnnnnnnnnnnnnnnnnnnnnnnnnnnnnnnnnnnnnnnnnnnnnnnnnnnnnnnnnnnnnnnnnnnnnnnnnnnnnnnnnnnnnnnnnnnnnnnnnnnnnnnnnnnnnnnnnnnnnnnnnnnnnnnnnnnnnnnnnnnnnnnnnnnnnnnnnnnnnnnnnnnnnnnnnnnnnnnnnnnnnnnnnnnnnnnnnnnnnnnnnnnnnnnnnnnnnnnnnnnnnnnnnnnnnnnnnnnnnnnnnnnnnnnnnnnnnnnnnnnnnnnnnnnnnnnnnnnnnnnnnnnnnnnnnnnnnnnnnnnnnnnnnnnnnnnnnnnnnnnnnnnnnnnnnnnnnnnnnnnnnnnnnnnnnnnnnnnnnnnnnnnnnnnnnnnnnnnnnnnnnnnnnnnnnnnnnnnnnnnnnnnnnnnnnnnnnnnnnnnnnnnnnnnnnnnnnnnnnnnnnnnnnnnnnnnnnnnnnnnnnnnnnnnnnnnnnnnnnnnnnnnnnnnnnnnnnnnnnnnnnnnnnnnnnnnnnnnnnnnnnnnnnnnnnnnnnnnnnnnnnnnnnnnnnnnnnnnnnnnnnnnnnnnnnnnnnnnnnnnnnnnnnnnnnnnnnnnnnnnnnnnnnnnnnnnnnnnnnnnnnnnnnnnnnnnnnnnnnnnnnnnnnnnnnnnnnnnnnnnnnnnnnnnnnnnnnnnnnnnnnnnnnnnnnnnnnnnnnnnnnnnnnnnnnnnnnnnnnnnnnnnnnnnnnnnnnnnnnnnnnnnnnnnnnnnnnnnnnnnnnnnnnnnnnnnnnnnnnnnnnnnnnnnnnnnnnnnnnnnnnnnnnnnnnnnnnnnnnnnnnnnnnnnnnnnnnnnnnnnnnnnnnnnnnnnnnnnnnnnnnnnnnnnnnnnnnnnnnnnnnnnnnnnnnnnnnnnnnnnnnnnnnnnnnnnnnnnnnnnnnnnnnnnnnnnnnnnnnnnnnnnnnnnnnnnnnnnnnnnnnnnnnnnnnnnnnnnnnnnnnnnnnnnnnnnnnnnnnnnnnnnnnnnnnnnnnnnnnnnnnnnnnnnnnnnnnnnnnnnnnnnnnnnnnnnnnnnnnnnnnnnnnnnnnnnnnnnnnnnnnnnnnnnnnnnnnnnnnnnnnnnnnnnnnnnnnnnnnnnnnnnnnnnnnnnnnnnnnnnnnnnnnnnnnnnnnnnnnnnnnnnnnnnnnnnnnnnnnnnnnnnnnnnnnnnnnnnnnnnnnnnnnnnnnnnnnnnnnnnnnnnnnnnnnnnnnnnnnnnnnnnnnnnnnnnnnnnnnnnnnnnnnnnnnnnnnnnnnnnnnnnnnnnnnnnnnnnnnnnnnnnnnnnnnnnnnnnnnnnnnnnnnnnnnnnnnnnnnnnnnnnnnnnnnnnnnnnnnnnnnnnnnnnnnnnnnnnnnnnnnnnnnnnnnnnnnnnnnnnnnnnnnnnnnnnnnnnnnnnnnnnnnnnnnnnnnnnnnnnnnnnnnnnnnnnnnnnnnnnnnnnnnnnnnnnnnnnnnnnnnnnnnnnnnnnnnnnnnnnnnnnnnnnnnnnnnnnnnnnnnnnnnnnnnnnnnnnnnnnnnnnnnnnnnnnnnnnnnnnnnnnnnnnnnnnnnnnnnnnnnnnnnnnnnnnnnnnnnnnnnnnnnnnnnnnnnnnnnnnnnnnnnnnnnnnnnnnnnnnnnnnnnnnnnnnnnnnnnnnnnnnnnnnnnnnnnnnnnnnnnnnnnnnnnnnnnnnnnnnnnnnnnnnnnnnnnnnnnnnnnnnnnnnnnnnnnnnnnnnnnnnnnnnnnnnnnnnnnnnnnnnnnnnnnnnnnnnnnnnnnnnnnnnnnnnnnnnnnnnnnnnnnnnnnnnnnnnnnnnnnnnnnnnnnnnnnnnnnnnnnnnnnnnnnnnnnnnnnnnnnnnnnnnnnnnnnnnnnnnnnnnnnnnnnnnnnnnnnnnnnnnnnnnnnnnnnnnnnnnnnnnnnnnnnnnnnnnnnnnnnnnnnnnnnnnnnnnnnnnnnnnnnnnnnnnnnnnnnnnnnnnnnnnnnnnnnnnnnnnnnnnnnnnnnnnnnnnnnnnnnnnnnnnnnnnnnnnnnnnnnnnnnnnnnnnnnnnnnnnnnnnnnnnnnnnnnnnnnnnnnnnnnnnnnnnnnnnnnnnnnnnnnnnnnnnnnnnnnnnnnnnnnnnnnnnnnnnnnnnnnnnnnnnnnnnnnnnnnnnnnnnnnnnnnnnnnnnnnnnnnnnnnnnnnnnnnnnnnnnnnnnnnnnnnnnnnnnnnnnnnnnnnnnnnnnnnnnnnnnnnnnnnnnnnnnnnnnnnnnnnnnnnnnnnnnnnnnnnnnnnnnnnnnnnnnnnnnnnnnnnnnnnnnnnnnnnnnnnnnnnnnnnnnnnnnnnnnnnnnnnnnnnnnnnnnnnnnnnnnnnnnnnnnnnnnnnnnnnnnnnnnnnnnnnnnnnnnnnnnnnnnnnnnnnnnnnnnnnnnnnnnnnnnnnnnnnnnnnnnnnnnnnnnnnnnnnnnnnnnnnnnnnnnnnnnnnnnnnnnnnnnnnnnnnnnnnnnnnnnnnnnnnnnnnnnnnnnnnnnnnnnnnnnnnnnnnnnnnnnnnnnnnnnnnnnnnnnnnnnnnnnnnnnnnnnnnnnnnnnnnnnnnnnnnnnnnnnnnnnnnnnnnnnnnnnnnnnnnnnnnnnnnnnnnnnnnnnnnnnnnnnnnnnnnnnnnnnnnnnnnnnnnnnnnnnnnnnnnnnnnnnnnnnnnnnnnnnnnnnnnnnnnnnnnnnnnnnnnnnnnnnnnnnnnnnnnnnnnnnnnnnnnnnnnnnnnnnnnnnnnnnnnnnnnnnnnnnnnnnnnnnnnnnnnnnnnnnnnnnnnnnnnnnnnnnnnnnnnnnnnnnnnnnnnnnnnnnnnnnnnnnnnnnnnnnnnnnnnnnnnnnnnnnnnnnnnnnnnnnnnnnnnnnnnnnnnnnnnnnnnnnnnnnnnnnnnnnnnnnnnnnnnnnnnnnnnnnnnnnnnnnnnnnnnnnnnnnnnnnnnnnnnnnnnnnnnnnnnnnnnnnnnnnnnnnnnnnnnnnnnnnnnnnnnnnnnnnnnnnnnnnnnnnnnnnnnnnnnnnnnnnnnnnnnnnnnnnnnnnnnnnnnnnnnnnnnnnnnnnnnnnnnnnnnnnnnnnnnnnnnnnnnnnnnnnnnnnnnnnnnnnnnnnnnnnnnnnnnnnnnnnnnnnnnnnnnnnnnnnnnnnnnnnnnnnnnnnnnnnnnnnnnnnnnnnnnnnnnnnnnnnnnnnnnnnnnnnnnnnnnnnnnnnnnnnnnnnnnnnnnnnnnnnnnnnnnnnnnnnnnnnnnnnnnnnnnnnnnnnnnnnnnnnnnnnnnnnnnnnnnnnnnnnnnnnnnnnnnnnnnnnnnnnnnnnnnnnnnnnnnnnnnnnnnnnnnnnnnnnnnnnnnnnnnnnnnnnnnnnnnnnnnnnnnnnnnnnnnnnnnnnnnnnnnnnnnnnnnnnnnnnnnnnnnnnnnnnnnnnnnnnnnnnnnnnnnnnnnnnnnnnnnnnnnnnnnnnnnnnnnnnnnnnnnnnnnnnnnnnnnnnnnnnnnnnnnnnnnnnnnnnnnnnnnnnnnnnnnnnnnnnnnnnnnnnnnnnnnnnnnnnnnnnnnnnnnnnnnnnnnnnnnnnnnnnnnnnnnnnnnnnnnnnnnnnnnnnnnnnnnnnnnnnnnnnnnnnnnnnnnnnnnnnnnnnnnnnnnnnnnnnnnnnnnnnnnnnnnnnnnnnnnnnnnnnnnnnnnnnnnnnnnnnnnnnnnnnnnnnnnnnnnnnnnnnnnnnnnnnnnnnnnnnnnnnnnnnnnnnnnnnnnnnnnnnnnnnnnnnnnnnnnnnnnnnnnnnnnnnnnnnnnnnnnnnnnnnnnnnnnnnnnnnnnnnnnnnnnnnnnnnnnnnnnnnnnnnnnnnnnnnnnnnnnnnnnnnnnnnnnnnnnnnnnnnnnnnnnnnnnnnnnnnnnnnnnnnnnnnnnnnnnnnnnnnnnnnnnnnnnnnnnnnnnnnnnnnnnnnnnnnnnnnnnnnnnnnnnnnnnnnnnnnnnnnnnnnnnnnnnnnnnnnnnnnnnnnnnnnnnnnnnnnnnnnnnnnnnnnnnnnnnnnnnnnnnnnnnnnnnnnnnnnnnnnnnnnnnnnnnnnnnnnnnnnnnnnnnnnnnnnnnnnnnnnnnnnnnnnnnnnnnnnnnnnnnnnnnnnnnnnnnnnnnnnnnnnnnnnnnnnnnnnnnnnnnnnnnnnnnnnnnnnnnnnnnnnnnnnnnnnnnnnnnnnnnnnnnnnnnnnnnnnnnnnnnnnnnnnnnnnnnnnnnnnnnnnnnnnnnnnnnnnnnnnnnnnnnnnnnnnnnnnnnnnnnnnnnnnnnnnnnnnnnnnnnnnnnnnnnnnnnnnnnnnnnnnnnnnnnnnnnnnnnnnnnnnnnnnnnnnnnnnnnnnnnnnnnnnnnnnnnnnnnnnnnnnnnnnnnnnnnnnnnnnnnnnnnnnnnnnnnnnnnnnnnnnnnnnnnnnnnnnnnnnnnnnnnnnnnnnnnnnnnnnnnnnnnnnnnnnnnnnnnnnnnnnnnnnnnnnnnnnnnnnnnnnnnnnnnnnnnnnnnnnnnnnnnnnnnnnnnnnnnnnnnnnnnnnnnnnnnnnnnnnnnnnnnnnnnnnnnnnnnnnnnnnnnnnnnnnnnnnnnnnnnnnnnnnnnnnnnnnnnnnnnnnnnnnnnnnnnnnnnnnnnnnnnnnnnnnnnnnnnnnnnnnnnnnnnnnnnnnnnnnnnnnnnnnnnnnnnnnnnnnnnnnnnnnnnnnnnnnnnnnnnnnnnnnnnnnnnnnnnnnnnnnnnnnnnnnnnnnnnnnnnnnnnnnnnnnnnnnnnnnnnnnnnnnnnnnnnnnnnnnnnnnnnnnnnnnnnnnnnnnnnnnnnnnnnnnnnnnnnnnnnnnnnnnnnnnnnnnnnnnnnnnnnnnnnnnnnnnnnnnnnnnnnnnnnnnnnnnnnnnnnnnnnnnnnnnnnnnnnnnnnnnnnnnnnnnnnnnnnnnnnnnnnnnnnnnnnnnnnnnnnnnnnnnnnnnnnnnnnnnnnnnnnnnnnnnnnnnnnnnnnnnnnnnnnnnnnnnnnnnnnnnnnnnnnnnnnnnnnnnnnnnnnnnnnnnnnnnnnnnnnnnnnnnnnnnnnnnnnnnnnnnnnnnnnnnnnnnnnnnnnnnnnnnnnnnnnnnnnnnnnnnnnnnnnnnnnnnnnnnnnnnnnnnnnnnnnnnnnnnnnnnnnnnnnnnnnnnnnnnnnnnnnnnnnnnnnnnnnnnnnnnnnnnnnnnnnnnnnnnnnnnnnnnnnnnnnnnnnnnnnnnnnnnnnnnnnnnnnnnnnnnnnnnnnnnnnnnnnnnnnnnnnnnnnnnnnnnnnnnnnnnnnnnnnnnnnnnnnnnnnnnnnnnnnnnnnnnnnnnnnnnnnnnnnnnnnnnnnnnnnnnnnnnnnnnnnnnnnnnnnnnnnnnnnnnnnnnnnnnnnnnnnnnnnnnnnnnnnnnnnnnnnnnnnnnnnnnnnnnnnnnnnnnnnnnnnnnnnnnnnnnnnnnnnnnnnnnnnnnnnnnnnnnnnnnnnnnnnnnnnnnnnnnnnnnnnnnnnnnnnnnnnnnnnnnnnnnnnnnnnnnnnnnnnnnnnnnnnnnnnnnnnnnnnnnnnnnnnnnnnnnnnnnnnnnnnnnnnnnnnnnnnnnnnnnnnnnnnnnnnnnnnnnnnnnnnnnnnnnnnnnnnnnnnnnnnnnnnnnnnnnnnnnnnnnnnnnnnnnnnnnnnnnnnnnnnnnnnnnnnnnnnnnnnnnnnnnnnnnnnnnnnnnnnnnnnnnnnnnnnnnnnnnnnnnnnnnnnnnnnnnnnnnnnnnnnnnnnnnnnnnnnnnnnnnnnnnnnnnnnnnnnnnnnnnnnnnnnnnnnnnnnnnnnnnnnnnnnnnnnnnnnnnnnnnnnnnnnnnnnnnnnnnnnnnnnnnnnnnnnnnnnnnnnnnnnnnnnnnnnnnnnnnnnnnnnnnnnnnnnnnnnnnnnnnnnnnnnnnnnnnnnnnnnnnnnnnnnnnnnnnnnnnnnnnnnnnnnnnnnnnnnnnnnnnnnnnnnnnnnnnnnnnnnnnnnnnnnnnnnnnnnnnnnnnnnnnnnnnnnnnnnnnnnnnnnnnnnnnnnnnnnnnnnnnnnnnnnnnnnnnnnnnnnnnnnnnnnnnnnnnnnnnnnnnnnnnnnnnnnnnnnnnnnnnnnnnnnnnnnnnnnnnnnnnnnnnnnnnnnnnnnnnnnnnnnnnnnnnnnnnnnnnnnnnnnnnnnnnnnnnnnnnnnnnnnnnnnnnnnnnnnnnnnnnnnnnnnnnnnnnnnnnnnnnnnnnnnnnnnnnnnnnnnnnnnnnnnnnnnnnnnnnnnnnnnnnnnnnnnnnnnnnnnnnnnnnnnnnnnnnnnnnnnnnnnnnnnnnnnnnnnnnnnnnnnnnnnnnnnnnnnnnnnnnnnnnnnnnnnnnnnnnnnnnnnnnnnnnnnnnnnnnnnnnnnnnnnnnnnnnnnnnnnnnnnnnnnnnnnnnnnnnnnnnnnnnnnnnnnnnnnnnnnnnnnnnnnnnnnnnnnnnnnnnnnnnnnnnnnnnnnnnnnnnnnnnnnnnnnnnnnnnnnnnnnnnnnnnnnnnnnnnnnnnnnnnnnnnnnnnnnnnnnnnnnnnnnnnnnnnnnnnnnnnnnnnnnnnnnnnnnnnnnnnnnnnnnnnnnnnnnnnnnnnnnnnnnnnnnnnnnnnnnnnnnnnnnnnnnnnnnnnnnnnnnnnnnnnnnnnnnnnnnnnnnnnnnnnnnnnnnnnnnnnnnnnnnnnnnnnnnnnnnnnnnnnnnnnnnnnnnnnnnnnnnnnnnnnnnnnnnnnnnnnnnnnnnnnnnnnnnnnnnnnnnnnnnnnnnnnnnnnnnnnnnnnnnnnnnnnnnnnnnnnnnnnnnnnnnnnnnnnnnnnnnnnnnnnnnnnnnnnnnnnnnnnnnnnnnnnnnnnnnnnnnnnnnnnnnnnnnnnnnnnnnnnnnnnnnnnnnnnnnnnnnnnnnnnnnnnnnnnnnnnnnnnnnnnnnnnnnnnnnnnnnnnnnnnnnnnnnnnnnnnnnnnnnnnnnnnnnnnnnnnnnnnnnnnnnnnnnnnnnnnnnnnnnnnnnnnnnnnnnnnnnnnnnnnnnnnnnnnnnnnnnnnnnnnnnnnnnnnnnnnnnnnnnnnnnnnnnnnnnnnnnnnnnnnnnnnnnnnnnnnnnnnnnnnnnnnnnnnnnnnnnnnnnnnnnnnnnnnnnnnnnnnnnnnnnnnnnnnnnnnnnnnnnnnnnnnnnnnnnnnnnnnnnnnnnnnnnnnnnnnnnnnnnnnnnnnnnnnnnnnnnnnnnnnnnnnnnnnnnnnnnnnnnnnnnnnnnnnnnnnnnnnnnnnnnnnnnnnnnnnnnnnnnnnnnnnnnnnnnnnnnnnnnnnnnnnnnnnnnnnnnnnnnnnnnnnnnnnnnnnnnnnnnnnnnnnnnnnnnnnnnnnnnnnnnnnnnnnnnnnnnnnnnnnnnnnnnnnnnnnnnnnnnnnnnnnnnnnnnnnnnnnnnnnnnnnnnnnnnnnnnnnnnnnnnnnnnnnnnnnnnnnnnnnnnnnnnnnnnnnnnnnnnnnnnnnnnnnnnnnnnnnnnnnnnnnnnnnnnnnnnnnnnnnnnnnnnnnnnnnnnnnnnnnnnnnnnnnnnnnnnnnnnnnnnnnnnnnnnnnnnnnnnnnnnnnnnnnnnnnnnnnnnnnnnnnnnnnnnnnnnnnnnnnnnnnnnnnnnnnnnnnnnnnnnnnnnnnnnnnnnnnnnnnnnnnnnnnnnnnnnnnnnnnnnnnnnnnnnnnnnnnnnnnnnnnnnnnnnnnnnnnnnnnnnnnnnnnnnnnnnnnnnnnnnnnnnnnnnnnnnnnnnnnnnnnnnnnnnnnnnnnnnnnnnnnnnnnnnnnnnnnnnnnnnnnnnnnnnnnnnnnnnnnnnnnnnnnnnnnnnnnnnnnnnnnnnnnnnnnnnnnnnnnnnnnnnnnnnnnnnnnnnnnnnnnnnnnnnnnnnnnnnnnnnnnnnnnnnnnnnnnnnnnnnnnnnnnnnnnnnnnnnnnnnnnnnnnnnnnnnnnnnnnnnnnnnnnnnnnnnnnnnnnnnnnnnnnnnnnnnnnnnnnnnnnnnnnnnnnnnnnnnnnnnnnnnnnnnnnnnnnnnnnnnnnnnnnnnnnnnnnnnnnnnnnnnnnnnnnnnnnnnnnnnnnnnnnnnnnnnnnnnnnnnnnnnnnnnnnnnnnnnnnnnnnnnnnnnnnnnnnnnnnnnnnnnnnnnnnnnnnnnnnnnnnnnnnnnnnnnnnnnnnnnnnnnnnnnnnnnnnnnnnnnnnnnnnnnnnnnnnnnnnnnnnnnnnnnnnnnnnnnnnnnnnnnnnnnnnnnnnnnnnnnnnnnnnnnnnnnnnnnnnnnnnnnnnnnnnnnnnnnnnnnnnnnnnnnnnnnnnnnnnnnnnnnnnnnnnnnnnnnnnnnnnnnnnnnnnnnnnnnnnnnnnnnnnnnnnnnnnnnnnnnnnnnnnnnnnnnnnnnnnnnnnnnnnnnnnnnnnnnnnnnnnnnnnnnnnnnnnnnnnnnnnnnnnnnnnnnnnnnnnnnnnnnnnnnnnnnnnnnnnnnnnnnnnnnnnnnnnnnnnnnnnnnnnnnnnnnnnnnnnnnnnnnnnnnnnnnnnnnnnnnnnnnnnnnnnnnnnnnnnnnnnnnnnnnnnnnnnnnnnnnnnnnnnnnnnnnnnnnnnnnnnnnnnnnnnnnnnnnnnnnnnnnnnnnnnnnnnnnnnnnnnnnnnnnnnnnnnnnnnnnnnnnnnnnnnnnnnnnnnnnnnnnnnnnnnnnnnnnnnnnnnnnnnnnnnnnnnnnnnnnnnnnnnnnnnnnnnnnnnnnnnnnnnnnnnnnnnnnnnnnnnnnnnnnnnnnnnnnnnnnnnnnnnnnnnnnnnnnnnnnnnnnnnnnnnnnnnnnnnnnnnnnnnnnnnnnnnnnnnnnnnnnnnnnnnnnnnnnnnnnnnnnnnnnnnnnnnnnnnnnnnnnnnnnnnnnnnnnnnnnnnnnnnnnnnnnnnnnnnnnnnnnnnnnnnnnnnnnnnnnnnnnnnnnnnnnnnnnnnnnnnnnnnnnnnnnnnnnnnnnnnnnnnnnnnnnnnnnnnnnnnnnnnnnnnnnnnnnnnnnnnnnnnnnnnnnnnnnnnnnnnnnnnnnnnnnnnnnnnnnnnnnnnnnnnnnnnnnnnnnnnnnnnnnnnnnnnnnnnnnnnnnnnnnnnnnnnnnnnnnnnnnnnnnnnnnnnnnnnnnnnnnnnnnnnnnnnnnnnnnnnnnnnnnnnnnnnnnnnnnnnnnnnnnnnnnnnnnnnnnnnnnnnnnnnnnnnnnnnnnnnnnnnnnnnnnnnnnnnnnnnnnnnnnnnnnnnnnnnnnnnnnnnnnnnnnnnnnnnnnnnnnnnnnnnnnnnnnnnnnnnnnnnnnnnnnnnnnnnnnnnnnnnnnnnnnnnnnnnnnnnnnnnnnnnnnnnnnnnnnnnnnnnnnnnnnnnnnnnnnnnnnnnnnnnnnnnnnnnnnnnnnnnnnnnnnnnnnnnnnnnnnnnnnnnnnnnnnnnnnnnnnnnnnnnnnnnnnnnnnnnnnnnnnnnnnnnnnnnnnnnnnnnnnnnnnnnnnnnnnnnnnnnnnnnnnnnnnnnnnnnnnnnnnnnnnnnnnnnnnnnnnnnnnnnnnnnnnnnnnnnnnnnnnnnnnnnnnnnnnnnnnnnnnnnnnnnnnnnnnnnnnnnnnnnnnnnnnnnnnnnnnnnnnnnnnnnnnnnnnnnnnnnnnnnnnnnnnnnnnnnnnnnnnnnnnnnnnnnnnnnnnnnnnnnnnnnnnnnnnnnnnnnnnnnnnnnnnnnnnnnnnnnnnnnnnnnnnnnnnnnnnnnnnnnnnnnnnnnnnnnnnnnnnnnnnnnnnnnnnnnnnnnnnnnnnnnnnnnnnnnnnnnnnnnnnnnnnnnnnnnnnnnnnnnnnnnnnnnnnnnnnnnnnnnnnnnnnnnnnnnnnnnnnnnnnnnnnnnnnnnnnnnnnnnnnnnnnnnnnnnnnnnnnnnnnnnnnnnnnnnnnnnnnnnnnnnnnnnnnnnnnnnnnnnnnnnnnnnnnnnnnnnnnnnnnnnnnnnnnnnnnnnnnnnnnnnnnnnnnnnnnnnnnnnnnnnnnnnnnnnnnnnnnnnnnnnnnnnnnnnnnnnnnnnnnnnnnnnnnnnnnnnnnnnnnnnnnnnnnnnnnnnnnnnnnnnnnnnnnnnnnnnnnnnnnnnnnnnnnnnnnnnnnnnnnnnnnnnnnnnnnnnnnnnnnnnnnnnnnnnnnnnnnnnnnnnnnnnnnnnnnnnnnnnnnnnnnnnnnnnnnnnnnnnnnnnnnnnnnnnnnnnnnnnnnnnnnnnnnnnnnnnnnnnnnnnnnnnnnnnnnnnnnnnnnnnnnnnnnnnnnnnnnnnnnnnnnnnnnnnnnnnnnnnnnnnnnnnnnnnnnnnnnnnnnnnnnnnnnnnnnnnnnnnnnnnnnnnnnnnnnnnnnnnnnnnnnnnnnnnnnnnnnnnnnnnnnnnnnnnnnnnnnnnnnnnnnnnnnnnnnnnnnnnnnnnnnnnnnnnnnnnnnnnnnnnnnnnnnnnnnnnnnnnnnnnnnnnnnnnnnnnnnnnnnnnnnnnnnnnnnnnnnnnnnnnnnnnnnnnnnnnnnnnnnnnnnnnnnnnnnnnnnnnnnnnnnnnnnnnnnnnnnnnnnnnnnnnnnnnnnnnnnnnnnnnnnnnnnnnnnnnnnnnnnnnnnnnnnnnnnnnnnnnnnnnnnnnnnnnnnnnnnnnnnnnnnnnnnnnnnnnnnnnnnnnnnnnnnnnnnnnnnnnnnnnnnnnnnnnnnnnnnnnnnnnnnnnnnnnnnnnnnnnnnnnnnnnnnnnnnnnnnnnnnnnnnnnnnnnnnnnnnnnnnnnnnnnnnnnnnnnnnnnnnnnnnnnnnnnnnnnnnnnnnnnnnnnnnnnnnnnnnnnnnnnnnnnnnnnnnnnnnnnnnnnnnnnnnnnnnnnnnnnnnnnnnnnnnnnnnnnnnnnnnnnnnnnnnnnnnnnnnnnnnnnnnnnnnnnnnnnnnnnnnnnnnnnnnnnnnnnnnnnnnnnnnnnnnnnnnnnnnnnnnnnnnnnnnnnnnnnnnnnnnnnnnnnnnnnnnnnnnnnnnnnnnnnnnnnnnnnnnnnnnnnnnnnnnnnnnnnnnnnnnnnnnnnnnnnnnnnnnnnnnnnnnnnnnnnnnnnnnnnnnnnnnnnnnnnnnnnnnnnnnnnnnnnnnnnnnnnnnnnnnnnnnnnnnnnnnnnnnnnnnnnnnnnnnnnnnnnnnnnnnnnnnnnnnnnnnnnnnnnnnnnnnnnnnnnnnnnnnnnnnnnnnnnnnnnnnnnnnnnnnnnnnnnnnnnnnnnnnnnnnnnnnnnnnnnnnnnnnnnnnnnnnnnnnnnnnnnnnnnnnnnnnnnnnnnnnnnnnnnnnnnnnnnnnnnnnnnnnnnnnnnnnnnnnnnnnnnnnnnnnnnnnnnnnnnnnnnnnnnnnnnnnnnnnnnnnnnnnnnnnnnnnnnnnnnnnnnnnnnnnnnnnnnnnnnnnnnnnnnnnnnnnnnnnnnnnnnnnnnnnnnnnnnnnnnnnnnnnnnnnnnnnnnnnnnnnnnnnnnnnnnnnnnnnnnnnnnnnnnnnnnnnnnnnnnnnnnnnnnnnnnnnnnnnnnnnnnnnnnnnnnnnnnnnnnnnnnnnnnnnnnnnnnnnnnnnnnnnnnnnnnnnnnnnnnnnnnnnnnnnnnnnnnnnnnnnnnnnnnnnnnnnnnnnnnnnnnnnnnnnnnnnnnnnnnnnnnnnnnnnnnnnnnnnnnnnnnnnnnnnnnnnnnnnnnnnnnnnnnnnnnnnnnnnnnnnnnnnnnnnnnnnnnnnnnnnnnnnnnnnnnnnnnnnnnnnnnnnnnnnnnnnnnnnnnnnnnnnnnnnnnnnnnnnnnnnnnnnnnnnnnnnnnnnnnnnnnnnnnnnnnnnnnnnnnnnnnnnnnnnnnnnnnnnnnnnnnnnnnnnnnnnnnnnnnnnnnnnnnnnnnnnnnnnnnnnnnnnnnnnnnnnnnnnnnnnnnnnnnnnnnnnnnnnnnnnnnnnnnnnnnnnnnnnnnnnnnnnnnnnnnnnnnnnnnnnnnnnnnnnnnnnnnnnnnnnnnnnnnnnnnnnnnnnnnnnnnnnnnnnnnnnnnnnnnnnnnnnnnnnnnnnnnnnnnnnnnnnnnnnnnnnnnnnnnnnnnnnnnnnnnnnnnnnnnnnnnnnnnnnnnnnnnnnnnnnnnnnnnnnnnnnnnnnnnnnnnnnnnnnnnnnnnnnnnnnnnnnnnnnnnnnnnnnnnnnnnnnnnnnnnnnnnnnnnnnnnnnnnnnnnnnnnnnnnnnnnnnnnnnnnnnnnnnnnnnnnnnnnnnnnnnnnnnnnnnnnnnnnnnnnnnnnnnnnnnnnnnnnnnnnnnnnnnnnnnnnnnnnnnnnnnnnnnnnnnnnnnnnnnnnnnnnnnnnnnnnnnnnnnnnnnnnnnnnnnnnnnnnnnnnnnnnnnnnnnnnnnnnnnnnnnnnnnnnnnnnnnnnnnnnnnnnnnnnnnnnnnnnnnnnnnnnnnnnnnnnnnnnnnnnnnnnnnnnnnnnnnnnnnnnnnnnnnnnnnnnnnnnnnnnnnnnnnnnnnnnnnnnnnnnnnnnnnnnnnnnnnnnnnnnnnnnnnnnnnnnnnnnnnnnnnnnnnnnnnnnnnnnnnnnnnnnnnnnnnnnnnnnnnnnnnnnnnnnnnnnnnnnnnnnnnnnnnnnnnnnnnnnnnnnnnnnnnnnnnnnnnnnnnnnnnnnnnnnnnnnnnnnnnnnnnnnnnnnnnnnnnnnnnnnnnnnnnnnnnnnnnnnnnnnnnnnnnnnnnnnnnnnnnnnnnnnnnnnnnnnnnnnnnnnnnnnnnnnnnnnnnnnnnnnnnnnnnnnnnnnnnnnnnnnnnnnnnnnnnnnnnnnnnnnnnnnnnnnnnnnnnnnnnnnnnnnnnnnnnnnnnnnnnnnnnnnnnnnnnnnnnnnnnnnnnnnnnnnnnnnnnnnnnnnnnnnnnnnnnnnnnnnnnnnnnnnnnnnnnnnnnnnnnnnnnnnnnnnnnnnnnnnnnnnnnnnnnnnnnnnnnnnnnnnnnnnnnnnnnnnnnnnnnnnnnnnnnnnnnnnnnnnnnnnnnnnnnnnnnnnnnnnnnnnnnnnnnnnnnnnnnnnnnnnnnnnnnnnnnnnnnnnnnnnnnnnnnnnnnnnnnnnnnnnnnnnnnnnnnnnnnnnnnnnnnnnnnnnnnnnnnnnnnnnnnnnnnnnnnnnnnnnnnnnnnnnnnnnnnnnnnnnnnnnnnnnnnnnnnnnnnnnnnnnnnnnnnnnnnnnnnnnnnnnnnnnnnnnnnnnnnnnnnnnnnnnnnnnnnnnnnnnnnnnnnnnnnnnnnnnnnnnnnnnnnnnnnnnnnnnnnnnnnnnnnnnnnnnnnnnnnnnnnnnnnnnnnnnnnnnnnnnnnnnnnnnnnnnnnnnnnnnnnnnnnnnnnnnnnnnnnnnnnnnnnnnnnnnnnnnnnnnnnnnnnnnnnnnnnnnnnnnnnnnnnnnnnnnnnnnnnnnnnnnnnnnnnnnnnnnnnnnnnnnnnnnnnnnnnnnnnnnnnnnnnnnnnnnnnnnnnnnnnnnnnnnnnnnnnnnnnnnnnnnnnnnnnnnnnnnnnnnnnnnnnnnnnnnnnnnnnnnnnnnnnnnnnnnnnnnnnnnnnnnnnnnnnnnnnnnnnnnnnnnnnnnnnnnnnnnnnnnnnnnnnnnnnnnnnnnnnnnnnnnnnnnnnnnnnnnnnnnnnnnnnnnnnnnnnnnnnnnnnnnnnnnnnnnnnnnnnnnnnnnnnnnnnnnnnnnnnnnnnnnnnnnnnnnnnnnnnnnnnnnnnnnnnnnnnnnnnnnnnnnnnnnnnnnnnnnnnnnnnnnnnnnnnnnnnnnnnnnnnnnnnnnnnnnnnnnnnnnnnnnnnnnnnnnnnnnnnnnnnnnnnnnnnnnnnnnnnnnnnnnnnnnnnnnnnnnnnnnnnnnnnnnnnnnnnnnnnnnnnnnnnnnnnnnnnnnnnnnnnnnnnnnnnnnnnnnnnnnnnnnnnnnnnnnnnnnnnnnnnnnnnnnnnnnnnnnnnnnnnnnnnnnnnnnnnnnnnnnnnnnnnnnnnnnnnnnnnnnnnnnnnnnnnnnnnnnnnnnnnnnnnnnnnnnnnnnnnnnnnnnnnnnnnnnnnnnnnnnnnnnnnnnnnnnnnnnnnnnnnnnnnnnnnnnnnnnnnnnnnnnnnnnnnnnnnnnnnnnnnnnnnnnnnnnnnnnnnnnnnnnnnnnnnnnnnnnnnnnnnnnnnnnnnnnnnnnnnnnnnnnnnnnnnnnnnnnnnnnnnnnnnnnnnnnnnnnnnnnnnnnnnnnnnnnnnnnnnnnnnnnnnnnnnnnnnnnnnnnnnnnnnnnnnnnnnnnnnnnnnnnnnnnnnnnnnnnnnnnnnnnnnnnnnnnnnnnnnnnnnnnnnnnnnnnnnnnnnnnnnnnnnnnnnnnnnnnnnnnnnnnnnnnnnnnnnnnnnnnnnnnnnnnnnnnnnnnnnnnnnnnnnnnnnnnnnnnnnnnnnnnnnnnnnnnnnnnnnnnnnnnnnnnnnnnnnnnnnnnnnnnnnnnnnnnnnnnnnnnnnnnnnnnnnnnnnnnnnnnnnnnnnnnnnnnnnnnnnnnnnnnnnnnnnnnnnnnnnnnnnnnnnnnnnnnnnnnnnnnnnnnnnnnnnnnnnnnnnnnnnnnnnnnnnnnnnnnnnnnnnnnnnnnnnnnnnnnnnnnnnnnnnnnnnnnnnnnnnnnnnnnnnnnnnnnnnnnnnnnnnnnnnnnnnnnnnnnnnnnnnnnnnnnnnnnnnnnnnnnnnnnnnnnnnnnnnnnnnnnnnnnnnnnnnnnnnnnnnnnnnnnnnnnnnnnnnnnnnnnnnnnnnnnnnnnnnnnnnnnnnnnnnnnnnnnnnnnnnnnnnnnnnnnnnnnnnnnnnnnnnnnnnnnnnnnnnnnnnnnnnnnnnnnnnnnnnnnnnnnnnnnnnnnnnnnnnnnnnnnnnnnnnnnnnnnnnnnnnnnnnnnnnnnnnnnnnnnnnnnnnnnnnnnnnnnnnnnnnnnnnnnnnnnnnnnnnnnnnnnnnnnnnnnnnnnnnnnnnnnnnnnnnnnnnnnnnnnnnnnnnnnnnnnnnnnnnnnnnnnnnnnnnnnnnnnnnnnnnnnnnnnnnnnnnnnnnnnnnnnnnnnnnnnnnnnnnnnnnnnnnnnnnnnnnnnnnnnnnnnnnnnnnnnnnnnnnnnnnnnnnnnnnnnnnnnnnnnnnnnnnnnnnnnnnnnnnnnnnnnnnnnnnnnnnnnnnnnnnnnnnnnnnnnnnnnnnnnnnnnnnnnnnnnnnnnnnnnnnnnnnnnnnnnnnnnnnnnnnnnnnnnnnnnnnnnnnnnnnnnnnnnnnnnnnnnnnnnnnnnnnnnnnnnnnnnnnnnnnnnnnnnnnnnnnnnnnnnnnnnnnnnnnnnnnnnnnnnnnnnnnnnnnnnnnnnnnnnnnnnnnnnnnnnnnnnnnnnnnnnnnnnnnnnnnnnnnnnnnnnnnnnnnnnnnnnnnnnnnnnnnnnnnnnnnnnnnnnnnnnnnnnnnnnnnnnnnnnnnnnnnnnnnnnnnnnnnnnnnnnnnnnnnnnnnnnnnnnnnnnnnnnnnnnnnnnnnnnnnnnnnnnnnnnnnnnnnnnnnnnnnnnnnnnnnnnnnnnnnnnnnnnnnnnnnnnnnnnnnnnnnnnnnnnnnnnnnnnnnnnnnnnnnnnnnnnnnnnnnnnnnnnnnnnnnnnnnnnnnnnnnnnnnnnnnnnnnnnnnnnnnnnnnnnnnnnnnnnnnnnnnnnnnnnnnnnnnnnnnnnnnnnnnnnnnnnnnnnnnnnnnnnnnnnnnnnnnnnnnnnnnnnnnnnnnnnnnnnnnnnnnnnnnnnnnnnnnnnnnnnnnnnnnnnnnnnnnnnnnnnnnnnnnnnnnnnnnnnnnnnnnnnnnnnnnnnnnnnnnnnnnnnnnnnnnnnnnnnnnnnnnnnnnnnnnnnnnnnnnnnnnnnnnnnnnnnnnnnnnnnnnnnnnnnnnnnnnnnnnnnnnnnnnnnnnnnnnnnnnnnnnnnnnnnnnnnnnnnnnnnnnnnnnnnnnnnnnnnnnnnnnnnnnnnnnnnnnnnnnnnnnnnnnnnnnnnnnnnnnnnnnnnnnnnnnnnnnnnnnnnnnnnnnnnnnnnnnnnnnnnnnnnnnnnnnnnnnnnnnnnnnnnnnnnnnnnnnnnnnnnnnnnnnnnnnnnnnnnnnnnnnnnnnnnnnnnnnnnnnnnnnnnnnnnnnnnnnnnnnnnnnnnnnnnnnnnnnnnnnnnnnnnnnnnnnnnnnnnnnnnnnnnnnnnnnnnnnnnnnnnnnnnnnnnnnnnnnnnnnnnnnnnnnnnnnnnnnnnnnnnnnnnnnnnnnnnnnnnnnnnnnnnnnnnnnnnnnnnnnnnnnnnnnnnnnnnnnnnnnnnnnnnnnnnnnnnnnnnnnnnnnnnnnnnnnnnnnnnnnnnnnnnnnnnnnnnnnnnnnnnnnnnnnnnnnnnnnnnnnnnnnnnnnnnnnnnnnnnnnnnnnnnnnnnnnnnnnnnnnnnnnnnnnnnnnnnnnnnnnnnnnnnnnnnnnnnnnnnnnnnnnnnnnnnnnnnnnnnnnnnnnnnnnnnnnnnnnnnnnnnnnnnnnnnnnnnnnnnnnnnnnnnnnnnnnnnnnnnnnnnnnnnnnnnnnnnnnnnnnnnnnnnnnnnnnnnnnnnnnnnnnnnnnnnnnnnnnnnnnnnnnnnnnnnnnnnnnnnnnnnnnnnnnnnnnnnnnnnnnnnnnnnnnnnnnnnnnnnnnnnnnnnnnnnnnnnnnnnnnnnnnnnnnnnnnnnnnnnnnnnnnnnnnnnnnnnnnnnnnnnnnnnnnnnnnnnnnnnnnnnnnnnnnnnnnnnnnnnnnnnnnnnnnnnnnnnnnnnnnnnnnnnnnnnnnnnnnnnnnnnnnnnnnnnnnnnnnnnnnnnnnnnnnnnnnnnnnnnnnnnnnnnnnnnnnnnnnnnnnnnnnnnnnnnnnnnnnnnnnnnnnnnnnnnnnnnnnnnnnnnnnnnnnnnnnnnnnnnnnnnnnnnnnnnnnnnnnnnnnnnnnnnnnnnnnnnnnnnnnnnnnnnnnnnnnnnnnnnnnnnnnnnnnnnnnnnnnnnnnnnnnnnnnnnnnnnnnnnnnnnnnnnnnnnnnnnnnnnnnnnnnnnnnnnnnnnnnnnnnnnnnnnnnnnnnnnnnnnnnnnnnnnnnnnnnnnnnnnnnnnnnnnnnnnnnnnnnnnnnnnnnnnnnnnnnnnnnnnnnnnnnnnnnnnnnnnnnnnnnnnnnnnnnnnnnnnnnnnnnnnnnnnnnnnnnnnnnnnnnnnnnnnnnnnnnnnnnnnnnnnnnnnnnnnnnnnnnnnnnnnnnnnnnnnnnnnnnnnnnnnnnnnnnnnnnnnnnnnnnnnnnnnnnnnnnnnnnnnnnnnnnnnnnnnnnnnnnnnnnnnnnnnnnnnnnnnnnnnnnnnnnnnnnnnnnnnnnnnnnnnnnnnnnnnnnnnnnnnnnnnnnnnnnnnnnnnnnnnnnnnnnnnnnnnnnnnnnnnnnnnnnnnnnnnnnnnnnnnnnnnnnnnnnnnnnnnnnnnnnnnnnnnnnnnnnnnnnnnnnnnnnnnnnnnnnnnnnnnnnnnnnnnnnnnnnnnnnnnnnnnnnnnnnnnnnnnnnnnnnnnnnnnnnnnnnnnnnnnnnnnnnnnnnnnnnnnnnnnnnnnnnnnnnnnnnnnnnnnnnnnnnnnnnnnnnnnnnnnnnnnnnnnnnnnnnnnnnnnnnnnnnnnnnnnnnnnnnnnnnnnnnnnnnnnnnnnnnnnnnnnnnnnnnnnnnnnnnnnnnnnnnnnnnnnnnnnnnnnnnnnnnnnnnnnnnnnnnnnnnnnnnnnnnnnnnnnnnnnnnnnnnnnnnnnnnnnnnnnnnnnnnnnnnnnnnnnnnnnnnnnnnnnnnnnnnnnnnnnnnnnnnnnnnnnnnnnnnnnnnnnnnnnnnnnnnnnnnnnnnnnnnnnnnnnnnnnnnnnnnnnnnnnnnnnnnnnnnnnnnnnnnnnnnnnnnnnnnnnnnnnnnnnnnnnnnnnnnnnnnnnnnnnnnnnnnnnnnnnnnnnnnnnnnnnnnnnnnnnnnnnnnnnnnnnnnnnnnnnnnnnnnnnnnnnnnnnnnnnnnnnnnnnnnnnnnnnnnnnnnnnnnnnnnnnnnnnnnnnnnnnnnnnnnnnnnnnnnnnnnnnnnnnnnnnnnnnnnnnnnnnnnnnnnnnnnnnnnnnnnnnnnnnnnnnnnnnnnnnnnnnnnnnnnnnnnnnnnnnnnnnnnnnnnnnnnnnnnnnnnnnnnnnnnnnnnnnnnnnnnnnnnnnnnnnnnnnnnnnnnnnnnnnnnnnnnnnnnnnnnnnnnnnnnnnnnnnnnnnnnnnnnnnnnnnnnnnnnnnnnnnnnnnnnnnnnnnnnnnnnnnnnnnnnnnnnnnnnnnnnnnnnnnnnnnnnnnnnnnnnnnnnnnnnnnnnnnnnnnnnnnnnnnnnnnnnnnnnnnnnnnnnnnnnnnnnnnnnnnnnnnnnnnnnnnnnnnnnnnnnnnnnnnnnnnnnnnnnnnnnnnnnnnnnnnnnnnnnnnnnnnnnnnnnnnnnnnnnnnnnnnnnnnnnnnnnnnnnnnnnnnnnnnnnnnnnnnnnnnnnnnnnnnnnnnnnnnnnnnnnnnnnnnnnnnnnnnnnnnnnnnnnnnnnnnnnnnnnnnnnnnnnnnnnnnnnnnnnnnnnnnnnnnnnnnnnnnnnnnnnnnnnnnnnnnnnnnnnnnnnnnnnnnnnnnnnnnnnnnnnnnnnnnnnnnnnnnnnnnnnnnnnnnnnnnnnnnnnnnnnnnnnnnnnnnnnnnnnnnnnnnnnnnnnnnnnnnnnnnnnnnnnnnnnnnnnnnnnnnnnnnnnnnnnnnnnnnnnnnnnnnnnnnnnnnnnnnnnnnnnnnnnnnnnnnnnnnnnnnnnnnnnnnnnnnnnnnnnnnnnnnnnnnnnnnnnnnnnnnnnnnnnnnnnnnnnnnnnnnnnnnnnnnnnnnnnnnnnnnnnnnnnnnnnnnnnnnnnnnnnnnnnnnnnnnnnnnnnnnnnnnnnnnnnnnnnnnnnnnnnnnnnnnnnnnnnnnnnnnnnnnnnnnnnnnnnnnnnnnnnnnnnnnnnnnnnnnnnnnnnnnnnnnnnnnnnnnnnnnnnnnnnnnnnnnnnnnnnnnnnnnnnnnnnnnnnnnnnnnnnnnnnnnnnnnnnnnnnnnnnnnnnnnnnnnnnnnnnnnnnnnnnnnnnnnnnnnnnnnnnnnnnnnnnnnnnnnnnnnnnnnnnnnnnnnnnnnnnnnnnnnnnnnnnnnnnnnnnnnnnnnnnnnnnnnnnnnnnnnnnnnnnnnnnnnnnnnnnnnnnnnnnnnnnnnnnnnnnnnnnnnnnnnnnnnnnnnnnnnnnnnnnnnnnnnnnnnnnnnnnnnnnnnnnnnnnnnnnnnnnnnnnnnnnnnnnnnnnnnnnnnnnnnnnnnnnnnnnnnnnnnnnnnnnnnnnnnnnnnnnnnnnnnnnnnnnnnnnnnnnnnnnnnnnnnnnnnnnnnnnnnnnnnnnnnnnnnnnnnnnnnnnnnnnnnnnnnnnnnnnnnnnnnnnnnnnnnnnnnnnnnnnnnnnnnnnnnnnnnnnnnnnnnnnnnnnnnnnnnnnnnnnnnnnnnnnnnnnnnnnnnnnnnnnnnnnnnnnnnnnnnnnnnnnnnnnnnnnnnnnnnnnnnnnnnnnnnnnnnnnnnnnnnnnnnnnnnnnnnnnnnnnnnnnnnnnnnnnnnnnnnnnnnnnnnnnnnnnnnnnnnnnnnnnnnnnnnnnnnnnnnnnnnnnnnnnnnnnnnnnnnnnnnnnnnnnnnnnnnnnnnnnnnnnnnnnnnnnnnnnnnnnnnnnnnnnnnnnnnnnnnnnnnnnnnnnnnnnnnnnnnnnnnnnnnnnnnnnnnnnnnnnnnnnnnnnnnnnnnnnnnnnnnnnnnnnnnnnnnnnnnnnnnnnnnnnnnnnnnnnnnnnnnnnnnnnnnnnnnnnnnnnnnnnnnnnnnnnnnnnnnnnnnnnnnnnnnnnnnnnnnnnnnnnnnnnnnnnnnnnnnnnnnnnnnnnnnnnnnnnnnnnnnnnnnnnnnnnnnnnnnnnnnnnnnnnnnnnnnnnnnnnnnnnnnnnnnnnnnnnnnnnnnnnnnnnnnnnnnnnnnnnnnnnnnnnnnnnnnnnnnnnnnnnnnnnnnnnnnnnnnnnnnnnnnnnnnnnnnnnnnnnnnnnnnnnnnnnnnnnnnnnnnnnnnnnnnnnnnnnnnnnnnnnnnnnnnnnnnnnnnnnnnnnnnnnnnnnnnnnnnnnnnnnnnnnnnnnnnnnnnnnnnnnnnnnnnnnnnnnnnnnnnnnnnnnnnnnnnnnnnnnnnnnnnnnnnnnnnnnnnnnnnnnnnnnnnnnnnnnnnnnnnnnnnnnnnnnnnnnnnnnnnnnnnnnnnnnnnnnnnnnnnnnnnnnnnnnnnnnnnnnnnnnnnnnnnnnnnnnnnnnnnnnnnnnnnnnnnnnnnnnnnnnnnnnnnnnnnnnnnnnnnnnnnnnnnnnnnnnnnnnnnnnnnnnnnnnnnnnnnnnnnnnnnnnnnnnnnnnnnnnnnnnnnnnnnnnnnnnnnnnnnnnnnnnnnnnnnnnnnnnnnnnnnnnnnnnnnnnnnnnnnnnnnnnnnnnnnnnnnnnnnnnnnnnnnnnnnnnnnnnnnnnnnnnnnnnnnnnnnnnnnnnnnnnnnnnnnnnnnnnnnnnnnnnnnnnnnnnnnnnnnnnnnnnnnnnnnnnnnnnnnnnnnnnnnnnnnnnnnnnnnnnnnnnnnnnnnnnnnnnnnnnnnnnnnnnnnnnnnnnnnnnnnnnnnnnnnnnnnnnnnnnnnnnnnnnnnnnnnnnnnnnnnnnnnnnnnnnnnnnnnnnnnnnnnnnnnnnnnnnnnnnnnnnnnnnnnnnnnnnnnnnnnnnnnnnnnnnnnnnnnnnnnnnnnnnnnnnnnnnnnnnnnnnnnnnnnnnnnnnnnnnnnnnnnnnnnnnnnnnnnnnnnnnnnnnnnnnnnnnnnnnnnnnnnnnnnnnnnnnnnnnnnnnnnnnnnnnnnnnnnnnnnnnnnnnnnnnnnnnnnnnnnnnnnnnnnnnnnnnnnnnnnnnnnnnnnnnnnnnnnnnnnnnnnnnnnnnnnnnnnnnnnnnnnnnnnnnnnnnnnnnnnnnnnnnnnnnnnnnnnnnnnnnnnnnnnnnnnnnnnnnnnnnnnnnnnnnnnnnnnnnnnnnnnnnnnnnnnnnnnnnnnnnnnnnnnnnnnnnnnnnnnnnnnnnnnnnnnnnnnnnnnnnnnnnnnnnnnnnnnnnnnnnnnnnnnnnnnnnnnnnnnnnnnnnnnnnnnnnnnnnnnnnnnnnnnnnnnnnnnnnnnnnnnnnnnnnnnnnnnnnnnnnnnnnnnnnnnnnnnnnnnnnnnnnnnnnnnnnnnnnnnnnnnnnnnnnnnnnnnnnnnnnnnnnnnnnnnnnnnnnnnnnnnnnnnnnnnnnnnnnnnnnnnnnnnnnnnnnnnnnnnnnnnnnnnnnnnnnnnnnnnnnnnnnnnnnnnnnnnnnnnnnnnnnnnnnnnnnnnnnnnnnnnnnnnnnnnnnnnnnnnnnnnnnnnnnnnnnnnnnnnnnnnnnnnnnnnnnnnnnnnnnnnnnnnnnnnnnnnnnnnnnnnnnnnnnnnnnnnnnnnnnnnnnnnnnnnnnnnnnnnnnnnnnnnnnnnnnnnnnnnnnnnnnnnnnnnnnnnnnnnnnnnnnnnnnnnnnnnnnnnnnnnnnnnnnnnnnnnnnnnnnnnnnnnnnnnnnnnnnnnnnnnnnnnnnnnnnnnnnnnnnnnnnnnnnnnnnnnnnnnnnnnnnnnnnnnnnnnnnnnnnnnnnnnnnnnnnnnnnnnnnnnnnnnnnnnnnnnnnnnnnnnnnnnnnnnnnnnnnnnnnnnnnnnnnnnnnnnnnnnnnnnnnnnnnnnnnnnnnnnnnnnnnnnnnnnnnnnnnnnnnnnnnnnnnnnnnnnnnnnnnnnnnnnnnnnnnnnnnnnnnnnnnnnnnnnnnnnnnnnnnnnnnnnnnnnnnnnnnnnnnnnnnnnnnnnnnnnnnnnnnnnnnnnnnnnnnnnnnnnnnnnnnnnnnnnnnnnnnnnnnnnnnnnnnnnnnnnnnnnnnnnnnnnnnnnnnnnnnnnnnnnnnnnnnnnnnnnnnnnnnnnnnnnnnnnnnnnnnnnnnnnnnnnnnnnnnnnnnnnnnnnnnnnnnnnnnnnnnnnnnnnnnnnnnnnnnnnnnnnnnnnnnnnnnnnnnnnnnnnnnnnnnnnnnnnnnnnnnnnnnnnnnnnnnnnnnnnnnnnnnnnnnnnnnnnnnnnnnnnnnnnnnnnnnnnnnnnnnnnnnnnnnnnnnnnnnnnnnnnnnnnnnnnnnnnnnnnnnnnnnnnnnnnnnnnnnnnnnnnnnnnnnnnnnnnnnnnnnnnnnnnnnnnnnnnnnnnnnnnnnnnnnnnnnnnnnnnnnnnnnnnnnnnnnnnnnnnnnnnnnnnnnnnnnnnnnnnnnnnnnnnnnnnnnnnnnnnnnnnnnnnnnnnnnnnnnnnnnnnnnnnnnnnnnnnnnnnnnnnnnnnnnnnnnnnnnnnnnnnnnnnnnnnnnnnnnnnnnnnnnnnnnnnnnnnnnnnnnnnnnnnnnnnnnnnnnnnnnnnnnnnnnnnnnnnnnnnnnnnnnnnnnnnnnnnnnnnnnnnnnnnnnnnnnnnnnnnnnnnnnnnnnnnnnnnnnnnnnnnnnnnnnnnnnnnnnnnnnnnnnnnnnnnnnnnnnnnnnnnnnnnnnnnnnnnnnnnnnnnnnnnnnnnnnnnnnnnnnnnnnnnnnnnnnnnnnnnnnnnnnnnnnnnnnnnnnnnnnnnnnnnnnnnnnnnnnnnnnnnnnnnnnnnnnnnnnnnnnnnnnnnnnnnnnnnnnnnnnnnnnnnnnnnnnnnnnnnnnnnnnnnnnnnnnnnnnnnnnnnnnnnnnnnnnnnnnnnnnnnnnnnnnnnnnnnnnnnnnnnnnnnnnnnnnnnnnnnnnnnnnnnnnnnnnnnnnnnnnnnnnnnnnnnnnnnnnnnnnnnnnnnnnnnnnnnnnnnnnnnnnnnnnnnnnnnnnnnnnnnnnnnnnnnnnnnnnnnnnnnnnnnnnnnnnnnnnnnnnnnnnnnnnnnnnnnnnnnnnnnnnnnnnnnnnnnnnnnnnnnnnnnnnnnnnnnnnnnnnnnnnnnnnnnnnnnnnnnnnnnnnnnnnnnnnnnnnnnnnnnnnnnnnnnnnnnnnnnnnnnnnnnnnnnnnnnnnnnnnnnnnnnnnnnnnnnnnnnnnnnnnnnnnnnnnnnnnnnnnnnnnnnnnnnnnnnnnnnnnnnnnnnnnnnnnnnnnnnnnnnnnnnnnnnnnnnnnnnnnnnnnnnnnnnnnnnnnnnnnnnnnnnnnnnnnnnnnnnnnnnnnnnnnnnnnnnnnnnnnnnnnnnnnnnnnnnnnnnnnnnnnnnnnnnnnnnnnnnnnnnnnnnnnnnnnnnnnnnnnnnnnnnnnnnnnnnnnnnnnnnnnnnnnnnnnnnnnnnnnnnnnnnnnnnnnnnnnnnnnnnnnnnnnnnnnnnnnnnnnnnnnnnnnnnnnnnnnnnnnnnnnnnnnnnnnnnnnnnnnnnnnnnnnnnnnnnnnnnnnnnnnnnnnnnnnnnnnnnnnnnnnnnnnnnnnnnnnnnnnnnnnnnnnnnnnnnnnnnnnnnnnnnnnnnnnnnnnnnnnnnnnnnnnnnnnnnnnnnnnnnnnnnnnnnnnnnnnnnnnnnnnnnnnnnnnnnnnnnnnnnnnnnnnnnnnnnnnnnnnnnnnnnnnnnnnnnnnnnnnnnnnnnnnnnnnnnnnnnnnnnnnnnnnnnnnnnnnnnnnnnnnnnnnnnnnnnnnnnnnnnnnnnnnnnnnnnnnnnnnnnnnnnnnnnnnnnnnnnnnnnnnnnnnnnnnnnnnnnnnnnnnnnnnnnnnnnnnnnnnnnnnnnnnnnnnnnnnnnnnnnnnnnnnnnnnnnnnnnnnnnnnnnnnnnnnnnnnnnnnnnnnnnnnnnnnnnnnnnnnnnnnnnnnnnnnnnnnnnnnnnnnnnnnnnnnnnnnnnnnnnnnnnnnnnnnnnnnnnnnnnnnnnnnnnnnnnnnnnnnnnnnnnnnnnnnnnnnnnnnnnnnnnnnnnnnnnnnnnnnnnnnnnnnnnnnnnnnnnnnnnnnnnnnnnnnnnnnnnnnnnnnnnnnnnnnnnnnnnnnnnnnnnnnnnnnnnnnnnnnnnnnnnnnnnnnnnnnnnnnnnnnnnnnnnnnnnnnnnnnnnnnnnnnnnnnnnnnnnnnnnnnnnnnnnnnnnnnnnnnnnnnnnnnnnnnnnnnnnnnnnnnnnnnnnnnnnnnnnnnnnnnnnnnnnnnnnnnnnnnnnnnnnnnnnnnnnnnnnnnnnnnnnnnnnnnnnnnnnnnnnnnnnnnnnnnnnnnnnnnnnnnnnnnnnnnnnnnnnnnnnnnnnnnnnnnnnnnnnnnnnnnnnnnnnnnnnnnnnnnnnnnnnnnnnnnnnnnnnnnnnnnnnnnnnnnnnnnnnnnnnnnnnnnnnnnnnnnnnnnnnnnnnnnnnnnnnnnnnnnnnnnnnnnnnnnnnnnnnnnnnnnnnnnnnnnnnnnnnnnnnnnnnnnnnnnnnnnnnnnnnnnnnnnnnnnnnnnnnnnnnnnnnnnnnnnnnnnnnnnnnnnnnnnnnnnnnnnnnnnnnnnnnnnnnnnnnnnnnnnnnnnnnnnnnnnnnnnnnnnnnnnnnnnnnnnnnnnnnnnnnnnnnnnnnnnnnnnnnnnnnnnnnnnnnnnnnnnnnnnnnnnnnnnnnnnnnnnnnnnnnnnnnnnnnnnnnnnnnnnnnnnnnnnnnnnnnnnnnnnnnnnnnnnnnnnnnnnnnnnnnnnnnnnnnnnnnnnnnnnnnnnnnnnnnnnnnnnnnnnnnnnnnnnnnnnnnnnnnnnnnnnnnnnnnnnnnnnnnnnnnnnnnnnnnnnnnnnnnnnnnnnnnnnnnnnnnnnnnnnnnnnnnnnnnnnnnnnnnnnnnnnnnnnnnnnnnnnnnnnnnnnnnnnnnnnnnnnnnnnnnnnnnnnnnnnnnnnnnnnnnnnnnnnnnnnnnnnnnnnnnnnnnnnnnnnnnnnnnnnnnnnnnnnnnnnnnnnnnnnnnnnnnnnnnnnnnnnnnnnnnnnnnnnnnnnnnnnnnnnnnnnnnnnnnnnnnnnnnnnnnnnnnnnnnnnnnnnnnnnnnnnnnnnnnnnnnnnnnnnnnnnnnnnnnnnnnnnnnnnnnnnnnnnnnnnnnnnnnnnnnnnnnnnnnnnnnnnnnnnnnnnnnnnnnnnnnnnnnnnnnnnnnnnnnnnnnnnnnnnnnnnnnnnnnnnnnnnnnnnnnnnnnnnnnnnnnnnnnnnnnnnnnnnnnnnnnnnnnnnnnnnnnnnnnnnnnnnnnnnnnnnnnnnnnnnnnnnnnnnnnnnnnnnnnnnnnnnnnnnnnnnnnnnnnnnnnnnnnnnnnnnnnnnnnnnnnnnnnnnnnnnnnnnnnnnnnnnnnnnnnnnnnnnnnnnnnnnnnnnnnnnnnnnnnnnnnnnnnnnnnnnnnnnnnnnnnnnnnnnnnnnnnnnnnnnnnnnnnnnnnnnnnnnnnnnnnnnnnnnnnnnnnnnnnnnnnnnnnnnnnnnnnnnnnnnnnnnnnnnnnnnnnnnnnnnnnnnnnnnnnnnnnnnnnnnnnnnnnnnnnnnnnnnnnnnnnnnnnnnnnnnnnnnnnnnnnnnnnnnnnnnnnnnnnnnnnnnnnnnnnnnnnnnnnnnnnnnnnnnnnnnnnnnnnnnnnnnnnnnnnnnnnnnnnnnnnnnnnnnnnnnnnnnnnnnnnnnnnnnnnnnnnnnnnnnnnnnnnnnnnnnnnnnnnnnnnnnnnnnnnnnnnnnnnnnnnnnnnnnnnnnnnnnnnnnnnnnnnnnnnnnnnnnnnnnnnnnnnnnnnnnnnnnnnnnnnnnnnnnnnnnnnnnnnnnnnnnnnnnnnnnnnnnnnnnnnnnnnnnnnnnnnnnnnnnnnnnnnnnnnnnnnnnnnnnnnnnnnnnnnnnnnnnnnnnnnnnnnnnnnnnnnnnnnnnnnnnnnnnnnnnnnnnnnnnnnnnnnnnnnnnnnnnnnnnnnnnnnnnnnnnnnnnnnnnnnnnnnnnnnnnnnnnnnnnnnnnnnnnnnnnnnnnnnnnnnnnnnnnnnnnnnnnnnnnnnnnnnnnnnnnnnnnnnnnnnnnnnnnnnnnnnnnnnnnnnnnnnnnnnnnnnnnnnnnnnnnnnnnnnnnnnnnnnnnnnnnnnnnnnnnnnnnnnnnnnnnnnnnnnnnnnnnnnnnnnnnnnnnnnnnnnnnnnnnnnnnnnnnnnnnnnnnnnnnnnnnnnnnnnnnnnnnnnnnnnnnnnnnnnnnnnnnnnnnnnnnnnnnnnnnnnnnnnnnnnnnnnnnnnnnnnnnnnnnnnnnnnnnnnnnnnnnnnnnnnnnnnnnnnnnnnnnnnnnnnnnnnnnnnnnnnnnnnnnnnnnnnnnnnnnnnnnnnnnnnnnnnnnnnnnnnnnnnnnnnnnnnnnnnnnnnnnnnnnnnnnnnnnnnnnnnnnnnnnnnnnnnnnnnnnnnnnnnnnnnnnnnnnnnnnnnnnnnnnnnnnnnnnnnnnnnnnnnnnnnnnnnnnnnnnnnnnnnnnnnnnnnnnnnnnnnnnnnnnnnnnnnnnnnnnnnnnnnnnnnnnnnnnnnnnnnnnnnnnnnnnnnnnnnnnnnnnnnnnnnnnnnnnnnnnnnnnnnnnnnnnnnnnnnnnnnnnnnnnnnnnnnnnnnnnnnnnnnnnnnnnnnnnnnnnnnnnnnnnnnnnnnnnnnnnnnnnnnnnnnnnnnnnnnnnnnnnnnnnnnnnnnnnnnnnnnnnnnnnnnnnnnnnnnnnnnnnnnnnnnnnnnnnnnnnnnnnnnnnnnnnnnnnnnnnnnnnnnnnnnnnnnnnnnnnnnnnnnnnnnnnnnnnnnnnnnnnnnnnnnnnnnnnnnnnnnnnnnnnnnnnnnnnnnnnnnnnnnnnnnnnnnnnnnnnnnnnnnnnnnnnnnnnnnnnnnnnnnnnnnnnnnnnnnnnnnnnnnnnnnnnnnnnnnnnnnnnnnnnnnnnnnnnnnnnnnnnnnnnnnnnnnnnnnnnnnnnnnnnnnnnnnnnnnnnnnnnnnnnnnnnnnnnnnnnnnnnnnnnnnnnnnnnnnnnnnnnnnnnnnnnnnnnnnnnnnnnnnnnnnnnnnnnnnnnnnnnnnnnnnnnnnnnnnnnnnnnnnnnnnnnnnnnnnnnnnnnnnnnnnnnnnnnnnnnnnnnnnnnnnnnnnnnnnnnnnnnnnnnnnnnnnnnnnnnnnnnnnnnnnnnnnnnnnnnnnnnnnnnnnnnnnnnnnnnnnnnnnnnnnnnnnnnnnnnnnnnnnnnnnnnnnnnnnnnnnnnnnnnnnnnnnnnnnnnnnnnnnnnnnnnnnnnnnnnnnnnnnnnnnnnnnnnnnnnnnnnnnnnnnnnnnnnnnnnnnnnnnnnnnnnnnnnnnnnnnnnnnnnnnnnnnnnnnnnnnnnnnnnnnnnnnnnnnnnnnnnnnnnnnnnnnnnnnnnnnnnnnnnnnnnnnnnnnnnnnnnnnnnnnnnnnnnnnnnnnnnnnnnnnnnnnnnnnnnnnnnnnnnnnnnnnnnnnnnnnnnnnnnnnnnnnnnnnnnnnnnnnnnnnnnnnnnnnnnnnnnnnnnnnnnnnnnnnnnnnnnnnnnnnnnnnnnnnnnnnnnnnnnnnnnnnnnnnnnnnnnnnnnnnnnnnnnnnnnnnnnnnnnnnnnnnnnnnnnnnnnnnnnnnnnnnnnnnnnnnnnnnnnnnnnnnnnnnnnnnnnnnnnnnnnnnnnnnnnnnnnnnnnnnnnnnnnnnnnnnnnnnnnnnnnnnnnnnnnnnnnnnnnnnnnnnnnnnnnnnnnnnnnnnnnnnnnnnnnnnnnnnnnnnnnnnnnnnnnnnnnnnnnnnnnnnnnnnnnnnnnnnnnnnnnnnnnnnnnnnnnnnnnnnnnnnnnnnnnnnnnnnnnnnnnnnnnnnnnnnnnnnnnnnnnnnnnnnnnnnnnnnnnnnnnnnnnnnnnnnnnnnnnnnnnnnnnnnnnnnnnnnnnnnnnnnnnnnnnnnnnnnnnnnnnnnnnnnnnnnnnnnnnnnnnnnnnnnnnnnnnnnnnnnnnnnnnnnnnnnnnnnnnnnnnnnnnnnnnnnnnnnnnnnnnnnnnnnnnnnnnnnnnnnnnnnnnnnnnnnnnnnnnnnnnnnnnnnnnnnnnnnnnnnnnnnnnnnnnnnnnnnnnnnnnnnnnnnnnnnnnnnnnnnnnnnnnnnnnnnnnnnnnnnnnnnnnnnnnnnnnnnnnnnnnnnnnnnnnnnnnnnnnnnnnnnnnnnnnnnnnnnnnnnnnnnnnnnnnnnnnnnnnnnnnnnnnnnnnnnnnnnnnnnnnnnnnnnnnnnnnnnnnnnnnnnnnnnnnnnnnnnnnnnnnnnnnnnnnnnnnnnnnnnnnnnnnnnnnnnnnnnnnnnnnnnnnnnnnnnnnnnnnnnnnnnnnnnnnnnnnnnnnnnnnnnnnnnnnnnnnnnnnnnnnnnnnnnnnnnnnnnnnnnnnnnnnnnnnnnnnnnnnnnnnnnnnnnnnnnnnnnnnnnnnnnnnnnnnnnnnnnnnnnnnnnnnnnnnnnnnnnnnnnnnnnnnnnnnnnnnnnnnnnnnnnnnnnnnnnnnnnnnnnnnnnnnnnnnnnnnnnnnnnnnnnnnnnnnnnnnnnnnnnnnnnnnnnnnnnnnnnnnnnnnnnnnnnnnnnnnnnnnnnnnnnnnnnnnnnnnnnnnnnnnnnnnnnnnnnnnnnnnnnnnnnnnnnnnnnnnnnnnnnnnnnnnnnnnnnnnnnnnnnnnnnnnnnnnnnnnnnnnnnnnnnnnnnnnnnnnnnnnnnnnnnnnnnnnnnnnnnnnnnnnnnnnnnnnnnnnnnnnnnnnnnnnnnnnnnnnnnnnnnnnnnnnnnnnnnnnnnnnnnnnnnnnnnnnnnnnnnnnnnnnnnnnnnnnnnnnnnnnnnnnnnnnnnnnnnnnnnnnnnnnnnnnnnnnnnnnnnnnnnnnnnnnnnnnnnnnnnnnnnnnnnnnnnnnnnnnnnnnnnnnnnnnnnnnnnnnnnnnnnnnnnnnnnnnnnnnnnnnnnnnnnnnnnnnnnnnnnnnnnnnnnnnnnnnnnnnnnnnnnnnnnnnnnnnnnnnnnnnnnnnnnnnnnnnnnnnnnnnnnnnnnnnnnnnnnnnnnnnnnnnnnnnnnnnnnnnnnnnnnnnnnnnnnnnnnnnnnnnnnnnnnnnnnnnnnnnnnnnnnnnnnnnnnnnnnnnnnnnnnnnnnnnnnnnnnnnnnnnnnnnnnnnnnnnnnnnnnnnnnnnnnnnnnnnnnnnnnnnnnnnnnnnnnnnnnnnnnnnnnnnnnnnnnnnnnnnnnnnnnnnnnnnnnnnnnnnnnnnnnnnnnnnnnnnnnnnnnnnnnnnnnnnnnnnnnnnnnnnnnnnnnnnnnnnnnnnnnnnnnnnnnnnnnnnnnnnnnnnnnnnnnnnnnnnnnnnnnnnnnnnnnnnnnnnnnnnnnnnnnnnnnnnnnnnnnnnnnnnnnnnnnnnnnnnnnnnnnnnnnnnnnnnnnnnnnnnnnnnnnnnnnnnnnnnnnnnnnnnnnnnnnnnnnnnnnnnnnnnnnnnnnnnnnnnnnnnnnnnnnnnnnnnnnnnnnnnnnnnnnnnnnnnnnnnnnnnnnnnnnnnnnnnnnnnnnnnnnnnnnnnnnnnnnnnnnnnnnnnnnnnnnnnnnnnnnnnnnnnnnnnnnnnnnnnnnnnnnnnnnnnnnnnnnnnnnnnnnnnnnnnnnnnnnnnnnnnnnnnnnnnnnnnnnnnnnnnnnnnnnnnnnnnnnnnnnnnnnnnnnnnnnnnnnnnnnnnnnnnnnnnnnnnnnnnnnnnnnnnnnnnnnnnnnnnnnnnnnnnnnnnnnnnnnnnnnnnnnnnnnnnnnnnnnnnnnnnnnnnnnnnnnnnnnnnnnnnnnnnnnnnnnnnnnnnnnnnnnnnnnnnnnnnnnnnnnnnnnnnnnnnnnnnnnnnnnnnnnnnnnnnnnnnnnnnnnnnnnnnnnnnnnnnnnnnnnnnnnnnnnnnnnnnnnnnnnnnnnnnnnnnnnnnnnnnnnnnnnnnnnnnnnnnnnnnnnnnnnnnnnnnnnnnnnnnnnnnnnnnnnnnnnnnnnnnnnnnnnnnnnnnnnnnnnnnnnnnnnnnnnnnnnnnnnnnnnnnnnnnnnnnnnnnnnnnnnnnnnnnnnnnnnnnnnnnnnnnnnnnnnnnnnnnnnnnnnnnnnnnnnnnnnnnnnnnnnnnnnnnnnnnnnnnnnnnnnnnnnnnnnnnnnnnnnnnnnnnnnnnnnnnnnnnnnnnnnnnnnnnnnnnnnnnnnnnnnnnnnnnnnnnnnnnnnnnnnnnnnnnnnnnnnnnnnnnnnnnnnnnnnnnnnnnnnnnnnnnnnnnnnnnnnnnnnnnnnnnnnnnnnnnnnnnnnnnnnnnnnnnnnnnnnnnnnnnnnnnnnnnnnnnnnnnnnnnnnnnnnnnnnnnnnnnnnnnnnnnnnnnnnnnnnnnnnnnnnnnnnnnnnnnnnnnnnnnnnnnnnnnnnnnnnnnnnnnnnnnnnnnnnnnnnnnnnnnnnnnnnnnnnnnnnnnnnnnnnnnnnnnnnnnnnnnnnnnnnnnnnnnnnnnnnnnnnnnnnnnnnnnnnnnnnnnnnnnnnnnnnnnnnnnnnnnnnnnnnnnnnnnnnnnnnnnnnnnnnnnnnnnnnnnnnnnnnnnnnnnnnnnnnnnnnnnnnnnnnnnnnnnnnnnnnnnnnnnnnnnnnnnnnnnnnnnnnnnnnnnnnnnnnnnnnnnnnnnnnnnnnnnnnnnnnnnnnnnnnnnnnnnnnnnnnnnnnnnnnnnnnnnnnnnnnnnnnnnnnnnnnnnnnnnnnnnnnnnnnnnnnnnnnnnnnnnnnnnnnnnnnnnnnnnnnnnnnnnnnnnnnnnnnnnnnnnnnnnnnnnnnnnnnnnnnnnnnnnnnnnnnnnnnnnnnnnnnnnnnnnnnnnnnnnnnnnnnnnnnnnnnnnnnnnnnnnnnnnnnnnnnnnnnnnnnnnnnnnnnnnnnnnnnnnnnnnnnnnnnnnnnnnnnnnnnnnnnnnnnnnnnnnnnnnnnnnnnnnnnnnnnnnnnnnnnnnnnnnnnnnnnnnnnnnnnnnnnnnnnnnnnnnnnnnnnnnnnnnnnnnnnnnnnnnnnnnnnnnnnnnnnnnnnnnnnnnnnnnnnnnnnnnnnnnnnnnnnnnnnnnnnnnnnnnnnnnnnnnnnnnnnnnnnnnnnnnnnnnnnnnnnnnnnnnnnnnnnnnnnnnnnnnnnnnnnnnnnnnnnnnnnnnnnnnnnnnnnnnnnnnnnnnnnnnnnnnnnnnnnnnnnnnnnnnnnnnnnnnnnnnnnnnnnnnnnnnnnnnnnnnnnnnnnnnnnnnnnnnnnnnnnnnnnnnnnnnnnnnnnnnnnnnnnnnnnnnnnnnnnnnnnnnnnnnnnnnnnnnnnnnnnnnnnnnnnnnnnnnnnnnnnnnnnnnnnnnnnnnnnnnnnnnnnnnnnnnnnnnnnnnnnnnnnnnnnnnnnnnnnnnnnnnnnnnnnnnnnnnnnnnnnnnnnnnnnnnnnnnnnnnnnnnnnnnnnnnnnnnnnnnnnnnnnnnnnnnnnnnnnnnnnnnnnnnnnnnnnnnnnnnnnnnnnnnnnnnnnnnnnnnnnnnnnnnnnnnnnnnnnnnnnnnnnnnnnnnnnnnnnnnnnnnnnnnnnnnnnnnnnnnnnnnnnnnnnnnnnnnnnnnnnnnnnnnnnnnnnnnnnnnnnnnnnnnnnnnnnnnnnnnnnnnnnnnnnnnnnnnnnnnnnnnnnnnnnnnnnnnnnnnnnnnnnnnnnnnnnnnnnnnnnnnnnnnnnnnnnnnnnnnnnnnnnnnnnnnnnnnnnnnnnnnnnnnnnnnnnnnnnnnnnnnnnnnnnnnnnnnnnnnnnnnnnnnnnnnnnnnnnnnnnnnnnnnnnnnnnnnnnnnnnnnnnnnnnnnnnnnnnnnnnnnnnnnnnnnnnnnnnnnnnnnnnnnnnnnnnnnnnnnnnnnnnnnnnnnnnnnnnnnnnnnnnnnnnnnnnnnnnnnnnnnnnnnnnnnnnnnnnnnnnnnnnnnnnnnnnnnnnnnnnnnnnnnnnnnnnnnnnnnnnnnnnnnnnnnnnnnnnnnnnnnnnnnnnnnnnnnnnnnnnnnnnnnnnnnnnnnnnnnnnnnnnnnnnnnnnnnnnnnnnnnnnnnnnnnnnnnnnnnnnnnnnnnnnnnnnnnnnnnnnnnnnnnnnnnnnnnnnnnnnnnnnnnnnnnnnnnnnnnnnnnnnnnnnnnnnnnnnnnnnnnnnnnnnnnnnnnnnnnnnnnnnnnnnnnnnnnnnnnnnnnnnnnnnnnnnnnnnnnnnnnnnnnnnnnnnnnnnnnnnnnnnnnnnnnnnnnnnnnnnnnnnnnnnnnnnnnnnnnnnnnnnnnnnnnnnnnnnnnnnnnnnnnnnnnnnnnnnnnnnnnnnnnnnnnnnnnnnnnnnnnnnnnnnnnnnnnnnnnnnnnnnnnnnnnnnnnnnnnnnnnnnnnnnnnnnnnnnnnnnnnnnnnnnnnnnnnnnnnnnnnnnnnnnnnnnnnnnnnnnnnnnnnnnnnnnnnnnnnnnnnnnnnnnnnnnnnnnnnnnnnnnnnnnnnnnnnnnnnnnnnnnnnnnnnnnnnnnnnnnnnnnnnnnnnnnnnnnnnnnnnnnnnnnnnnnnnnnnnnnnnnnnnnnnnnnnnnnnnnnnnnnnnnnnnnnnnnnnnnnnnnnnnnnnnnnnnnnnnnnnnnnnnnnnnnnnnnnnnnnnnnnnnnnnnnnnnnnnnnnnnnnnnnnnnnnnnnnnnnnnnnnnnnnnnnnnnnnnnnnnnnnnnnnnnnnnnnnnnnnnnnnnnnnnnnnnnnnnnnnnnnnnnnnnnnnnnnnnnnnnnnnnnnnnnnnnnnnnnnnnnnnnnnnnnnnnnnnnnnnnnnnnnnnnnnnnnnnnnnnnnnnnnnnnnnnnnnnnnnnnnnnnnnnnnnnnnnnnnnnnnnnnnnnnnnnnnnnnnnnnnnnnnnnnnnnnnnnnnnnnnnnnnnnnnnnnnnnnnnnnnnnnnnnnnnnnnnnnnnnnnnnnnnnnnnnnnnnnnnnnnnnnnnnnnnnnnnnnnnnnnnnnnnnnnnnnnnnnnnnnnnnnnnnnnnnnnnnnnnnnnnnnnnnnnnnnnnnnnnnnnnnnnnnnnnnnnnnnnnnnnnnnnnnnnnnnnnnnnnnnnnnnnnnnnnnnnnnnnnnnnnnnnnnnnnnnnnnnnnnnnnnnnnnnnnnnnnnnnnnnnnnnnnnnnnnnnnnnnnnnnnnnnnnnnnnnnnnnnnnnnnnnnnnnnnnnnnnnnnnnnnnnnnnnnnnnnnnnnnnnnnnnnnnnnnnnnnnnnnnnnnnnnnnnnnnnnnnnnnnnnnnnnnnnnnnnnnnnnnnnnnnnnnnnnnnnnnnnnnnnnnnnnnnnnnnnnnnnnnnnnnnnnnnnnnnnnnnnnnnnnnnnnnnnnnnnnnnnnnnnnnnnnnnnnnnnnnnnnnnnnnnnnnnnnnnnnnnnnnnnnnnnnnnnnnnnnnnnnnnnnnnnnnnnnnnnnnnnnnnnnnnnnnnnnnnnnnnnnnnnnnnnnnnnnnnnnnnnnnnnnnnnnnnnnnnnnnnnnnnnnnnnnnnnnnnnnnnnnnnnnnnnnnnnnnnnnnnnnnnnnnnnnnnnnnnnnnnnnnnnnnnnnnnnnnnnnnnnnnnnnnnnnnnnnnnnnnnnnnnnnnnnnnnnnnnnnnnnnnnnnnnnnnnnnnnnnnnnnnnnnnnnnnnnnnnnnnnnnnnnnnnnnnnnnnnnnnnnnnnnnnnnnnnnnnnnnnnnnnnnnnnnnnnnnnnnnnnnnnnnnnnnnnnnnnnnnnnnnnnnnnnnnnnnnnnnnnnnnnnnnnnnnnnnnnnnnnnnnnnnnnnnnnnnnnnnnnnnnnnnnnnnnnnnnnnnnnnnnnnnnnnnnnnnnnnnnnnnnnnnnnnnnnnnnnnnnnnnnnnnnnnnnnnnnnnnnnnnnnnnnnnnnnnnnnnnnnnnnnnnnnnnnnnnnnnnnnnnnnnnnnnnnnnnnnnnnnnnnnnnnnnnnnnnnnnnnnnnnnnnnnnnnnnnnnnnnnnnnnnnnnnnnnnnnnnnnnnnnnnnnnnnnnnnnnnnnnnnnnnnnnnnnnnnnnnnnnnnnnnnnnnnnnnnnnnnnnnnnnnnnnnnnnnnnnnnnnnnnnnnnnnnnnnnnnnnnnnnnnnnnnnnnnnnnnnnnnnnnnnnnnnnnnnnnnnnnnnnnnnnnnnnnnnnnnnnnnnnnnnnnnnnnnnnnnnnnnnnnnnnnnnnnnnnnnnnnnnnnnnnnnnnnnnnnnnnnnnnnnnnnnnnnnnnnnnnnnnnnnnnnnnnnnnnnnnnnnnnnnnnnnnnnnnnnnnnnnnnnnnnnnnnnnnnnnnnnnnnnnnnnnnnnnnnnnnnnnnnnnnnnnnnnnnnnnnnnnnnnnnnnnnnnnnnnnnnnnnnnnnnnnnnnnnnnnnnnnnnnnnnnnnnnnnnnnnnnnnnnnnnnnnnnnnnnnnnnnnnnnnnnnnnnnnnnnnnnnnnnnnnnnnnnnnnnnnnnnnnnnnnnnnnnnnnnnnnnnnnnnnnnnnnnnnnnnnnnnnnnnnnnnnnnnnnnnnnnnnnnnnnnnnnnnnnnnnnnnnnnnnnnnnnnnnnnnnnnnnnnnnnnnnnnnnnnnnnnnnnnnnnnnnnnnnnnnnnnnnnnnnnnnnnnnnnnnnnnnnnnnnnnnnnnnnnnnnnnnnnnnnnnnnnnnnnnnnnnnnnnnnnnnnnnnnnnnnnnnnnnnnnnnnnnnnnnnnnnnnnnnnnnnnnnnnnnnnnnnnnnnnnnnnnnnnnnnnnnnnnnnnnnnnnnnnnnnnnnnnnnnnnnnnnnnnnnnnnnnnnnnnnnnnnnnnnnnnnnnnnnnnnnnnnnnnnnnnnnnnnnnnnnnnnnnnnnnnnnnnnnnnnnnnnnnnnnnnnnnnnnnnnnnnnnnnnnnnnnnnnnnnnnnnnnnnnnnnnnnnnnnnnnnnnnnnnnnnnnnnnnnnnnnnnnnnnnnnnnnnnnnnnnnnnnnnnnnnnnnnnnnnnnnnnnnnnnnnnnnnnnnnnnnnnnnnnnnnnnnnnnnnnnnnnnnnnnnnnnnnnnnnnnnnnnnnnnnnnnnnnnnnnnnnnnnnnnnnnnnnnnnnnnnnnnnnnnnnnnnnnnnnnnnnnnnnnnnnnnnnnnnnnnnnnnnnnnnnnnnnnnnnnnnnnnnnnnnnnnnnnnnnnnnnnnnnnnnnnnnnnnnnnnnnnnnnnnnnnnnnnnnnnnnnnnnnnnnnnnnnnnnnnnnnnnnnnnnnnnnnnnnnnnnnnnnnnnnnnnnnnnnnnnnnnnnnnnnnnnnnnnnnnnnnnnnnnnnnnnnnnnnnnnnnnnnnnnnnnnnnnnnnnnnnnnnnnnnnnnnnnnnnnnnnnnnnnnnnnnnnnnnnnnnnnnnnnnnnnnnnnnnnnnnnnnnnnnnnnnnnnnnnnnnnnnnnnnnnnnnnnnnnnnnnnnnnnnnnnnnnnnnnnnnnnnnnnnnnnnnnnnnnnnnnnnnnnnnnnnnnnnnnnnnnnnnnnnnnnnnnnnnnnnnnnnnnnnnnnnnnnnnnnnnnnnnnnnnnnnnnnnnnnnnnnnnnnnnnnnnnnnnnnnnnnnnnnnnnnnnnnnnnnnnnnnnnnnnnnnnnnnnnnnnnnnnnnnnnnnnnnnnnnnnnnnnnnnnnnnnnnnnnnnnnnnnnnnnnnnnnnnnnnnnnnnnnnnnnnnnnnnnnnnnnnnnnnnnnnnnnnnnnnnnnnnnnnnnnnnnnnnnnnnnnnnnnnnnnnnnnnnnnnnnnnnnnnnnnnnnnnnnnnnnnnnnnnnnnnnnnnnnnnnnnnnnnnnnnnnnnnnnnnnnnnnnnnnnnnnnnnnnnnnnnnnnnnnnnnnnnnnnnnnnnnnnnnnnnnnnnnnnnnnnnnnnnnnnnnnnnnnnnnnnnnnnnnnnnnnnnnnnnnnnnnnnnnnnnnnnnnnnnnnnnnnnnnnnnnnnnnnnnnnnnnnnnnnnnnnnnnnnnnnnnnnnnnnnnnnnnnnnnnnnnnnnnnnnnnnnnnnnnnnnnnnnnnnnnnnnnnnnnnnnnnnnnnnnnnnnnnnnnnnnnnnnnnnnnnnnnnnnnnnnnnnnnnnnnnnnnnnnnnnnnnnnnnnnnnnnnnnnnnnnnnnnnnnnnnnnnnnnnnnnnnnnnnnnnnnnnnnnnnnnnnnnnnnnnnnnnnnnnnnnnnnnnnnnnnnnnnnnnnnnnnnnnnnnnnnnnnnnnnnnnnnnnnnnnnnnnnnnnnnnnnnnnnnnnnnnnnnnnnnnnnnnnnnnnnnnnnnnnnnnnnnnnnnnnnnnnnnnnnnnnnnnnnnnnnnnnnnnnnnnnnnnnnnnnnnnnnnnnnnnnnnnnnnnnnnnnnnnnnnnnnnnnnnnnnnnnnnnnnnnnnnnnnnnnnnnnnnnnnnnnnnnnnnnnnnnnnnnnnnnnnnnnnnnnnnnnnnnnnnnnnnnnnnnnnnnnnnnnnnnnnnnnnnnnnnnnnnnnnnnnnnnnnnnnnnnnnnnnnnnnnnnnnnnnnnnnnnnnnnnnnnnnnnnnnnnnnnnnnnnnnnnnnnnnnnnnnnnnnnnnnnnnnnnnnnnnnnnnnnnnnnnnnnnnnnnnnnnnnnnnnnnnnnnnnnnnnnnnnnnnnnnnnnnnnnnnnnnnnnnnnnnnnnnnnnnnnnnnnnnnnnnnnnnnnnnnnnnnnnnnnnnnnnnnnnnnnnnnnnnnnnnnnnnnnnnnnnnnnnnnnnnnnnnnnnnnnnnnnnnnnnnnnnnnnnnnnnnnnnnnnnnnnnnnnnnnnnnnnnnnnnnnnnnnnnnnnnnnnnnnnnnnnnnnnnnnnnnnnnnnnnnnnnnnnnnnnnnnnnnnnnnnnnnnnnnnnnnnnnnnnnnnnnnnnnnnnnnnnnnnnnnnnnnnnnnnnnnnnnnnnnnnnnnnnnnnnnnnnnnnnnnnnnnnnnnnnnnnnnnnnnnnnnnnnnnnnnnnnnnnnnnnnnnnnnnnnnnnnnnnnnnnnnnnnnnnnnnnnnnnnnnnnnnnnnnnnnnnnnnnnnnnnnnnnnnnnnnnnnnnnnnnnnnnnnnnnnnnnnnnnnnnnnnnnnnnnnnnnnnnnnnnnnnnnnnnnnnnnnnnnnnnnnnnnnnnnnnnnnnnnnnnnnnnnnnnnnnnnnnnnnnnnnnnnnnnnnnnnnnnnnnnnnnnnnnnnnnnnnnnnnnnnnnnnnnnnnnnnnnnnnnnnnnnnnnnnnnnnnnnnnnnnnnnnnnnnnnnnnnnnnnnnnnnnnnnnnnnnnnnnnnnnnnnnnnnnnnnnnnnnnnnnnnnnnnnnnnnnnnnnnnnnnnnnnnnnnnnnnnnnnnnnnnnnnnnnnnnnnnnnnnnnnnnnnnnnnnnnnnnnnnnnnnnnnnnnnnnnnnnnnnnnnnnnnnnnnnnnnnnnnnnnnnnnnnnnnnnnnnnnnnnnnnnnnnnnnnnnnnnnnnnnnnnnnnnnnnnnnnnnnnnnnnnnnnnnnnnnnnnnnnnnnnnnnnnnnnnnnnnnnnnnnnnnnnnnnnnnnnnnnnnnnnnnnnnnnnnnnnnnnnnnnnnnnnnnnnnnnnnnnnnnnnnnnnnnnnnnnnnnnnnnnnnnnnnnnnnnnnnnnnnnnnnnnnnnnnnnnnnnnnnnnnnnnnnnnnnnnnnnnnnnnnnnnnnnnnnnnnnnnnnnnnnnnnnnnnnnnnnnnnnnnnnnnnnnnnnnnnnnnnnnnnnnnnnnnnnnnnnnnnnnnnnnnnnnnnnnnnnnnnnnnnnnnnnnnnnnnnnnnnnnnnnnnnnnnnnnnnnnnnnnnnnnnnnnnnnnnnnnnnnnnnnnnnnnnnnnnnnnnnnnnnnnnnnnnnnnnnnnnnnnnnnnnnnnnnnnnnnnnnnnnnnnnnnnnnnnnnnnnnnnnnnnnnnnnnnnnnnnnnnnnnnnnnnnnnnnnnnnnnnnnnnnnnnnnnnnnnnnnnnnnnnnnnnnnnnnnnnnnnnnnnnnnnnnnnnnnnnnnnnnnnnnnnnnnnnnnnnnnnnnnnnnnnnnnnnnnnnnnnnnnnnnnnnnnnnnnnnnnnnnnnnnnnnnnnnnnnnnnnnnnnnnnnnnnnnnnnnnnnnnnnnnnnnnnnnnnnnnnnnnnnnnnnnnnnnnnnnnnnnnnnnnnnnnnnnnnnnnnnnnnnnnnnnnnnnnnnnnnnnnnnnnnnnnnnnnnnnnnnnnnnnnnnnnnnnnnnnnnnnnnnnnnnnnnnnnnnnnnnnnnnnnnnnnnnnnnnnnnnnnnnnnnnnnnnnnnnnnnnnnnnnnnnnnnnnnnnnnnnnnnnnnnnnnnnnnnnnnnnnnnnnnnnnnnnnnnnnnnnnnnnnnnnnnnnnnnnnnnnnnnnnnnnnnnnnnnnnnnnnnnnnnnnnnnnnnnnnnnnnnnnnnnnnnnnnnnnnnnnnnnnnnnnnnnnnnnnnnnnnnnnnnnnnnnnnnnnnnnnnnnnnnnnnnnnnnnnnnnnnnnnnnnnnnnnnnnnnnnnnnnnnnnnnnnnnnnnnnnnnnnnnnnnnnnnnnnnnnnnnnnnnnnnnnnnnnnnnnnnnnnnnnnnnnnnnnnnnnnnnnnnnnnnnnnnnnnnnnnnnnnnnnnnnnnnnnnnnnnnnnnnnnnnnnnnnnnnnnnnnnnnnnnnnnnnnnnnnnnnnnnnnnnnnnnnnnnnnnnnnnnnnnnnnnnnnnnnnnnnnnnnnnnnnnnnnnnnnnnnnnnnnnnnnnnnnnnnnnnnnnnnnnnnnnnnnnnnnnnnnnnnnnnnnnnnnnnnnnnnnnnnnnnnnnnnnnnnnnnnnnnnnnnnnnnnnnnnnnnnnnnnnnnnnnnnnnnnnnnnnnnnnnnnnnnnnnnnnnnnnnnnnnnnnnnnnnnnnnnnnnnnnnnnnnnnnnnnnnnnnnnnnnnnnnnnnnnnnnnnnnnnnnnnnnnnnnnnnnnnnnnnnnnnnnnnnnnnnnnnnnnnnnnnnnnnnnnnnnnnnnnnnnnnnnnnnnnnnnnnnnnnnnnnnnnnnnnnnnnnnnnnnnnnnnnnnnnnnnnnnnnnnnnnnnnnnnnnnnnnnnnnnnnnnnnnnnnnnnnnnnnnnnnnnnnnnnnnnnnnnnnnnnnnnnnnnnnnnnnnnnnnnnnnnnnnnnnnnnnnnnnnnnnnnnnnnnnnnnnnnnnnnnnnnnnnnnnnnnnnnnnnnnnnnnnnnnnnnnnnnnnnnnnnnnnnnnnnnnnnnnnnnnnnnnnnnnnnnnnnnnnnnnnnnnnnnnnnnnnnnnnnnnnnnnnnnnnnnnnnnnnnnnnnnnnnnnnnnnnnnnnnnnnnnnnnnnnnnnnnnnnnnnnnnnnnnnnnnnnnnnnnnnnnnnnnnnnnnnnnnnnnnnnnnnnnnnnnnnnnnnnnnnnnnnnnnnnnnnnnnnnnnnnnnnnnnnnnnnnnnnnnnnnnnnnnnnnnnnnnnnnnnnnnnnnnnnnnnnnnnnnnnnnnnnnnnnnnnnnnnnnnnnnnnnnnnnnnnnnnnnnnnnnnnnnnnnnnnnnnnnnnnnnnnnnnnnnnnnnnnnnnnnnnnnnnnnnnnnnnnnnnnnnnnnnnnnnnnnnnnnnnnnnnnnnnnnnnnnnnnnnnnnnnnnnnnnnnnnnnnnnnnnnnnnnnnnnnnnnnnnnnnnnnnnnnnnnnnnnnnnnnnnnnnnnnnnnnnnnnnnnnnnnnnnnnnnnnnnnnnnnnnnnnnnnnnnnnnnnnnnnnnnnnnnnnnnnnnnnnnnnnnnnnnnnnnnnnnnnnnnnnnnnnnnnnnnnnnnnnnnnnnnnnnnnnnnnnnnnnnnnnnnnnnnnnnnnnnnnnnnnnnnnnnnnnnnnnnnnnnnnnnnnnnnnnnnnnnnnnnnnnnnnnnnnnnnnnnnnnnnnnnnnnnnnnnnnnnnnnnnnnnnnnnnnnnnnnnnnnnnnnnnnnnnnnnnnnnnnnnnnnnnnnnnnnnnnnnnnnnnnnnnnnnnnnnnnnnnnnnnnnnnnnnnnnnnnnnnnnnnnnnnnnnnnnnnnnnnnnnnnnnnnnnnnnnnnnnnnnnnnnnnnnnnnnnnnnnnnnnnnnnnnnnnnnnnnnnnnnnnnnnnnnnnnnnnnnnnnnnnnnnnnnnnnnnnnnnnnnnnnnnnnnnnnnnnnnnnnnnnnnnnnnnnnnnnnnnnnnnnnnnnnnnnnnnnnnnnnnnnnnnnnnnnnnnnnnnnnnnnnnnnnnnnnnnnnnnnnnnnnnnnnnnnnnnnnnnnnnnnnnnnnnnnnnnnnnnnnnnnnnnnnnnnnnnnnnnnnnnnnnnnnnnnnnnnnnnnnnnnnnnnnnnnnnnnnnnnnnnnnnnnnnnnnnnnnnnnnnnnnnnnnnnnnnnnnnnnnnnnnnnnnnnnnnnnnnnnnnnnnnnnnnnnnnnnnnnnnnnnnnnnnnnnnnnnnnnnnnnnnnnnnnnnnnnnnnnnnnnnnnnnnnnnnnnnnnnnnnnnnnnnnnnnnnnnnnnnnnnnnnnnnnnnnnnnnnnnnnnnnnnnnnnnnnnnnnnnnnnnnnnnnnnnnnnnnnnnnnnnnnnnnnnnnnnnnnnnnnnnnnnnnnnnnnnnnnnnnnnnnnnnnnnnnnnnnnnnnnnnnnnnnnnnnnnnnnnnnnnnnnnnnnnnnnnnnnnnnnnnnnnnnnnnnnnnnnnnnnnnnnnnnnnnnnnnnnnnnnnnnnnnnnnnnnnnnnnnnnnnnnnnnnnnnnnnnnnnnnnnnnnnnnnnnnnnnnnnnnnnnnnnnnnnnnnnnnnnnnnnnnnnnnnnnnnnnnnnnnnnnnnnnnnnnnnnnnnnnnnnnnnnnnnnnnnnnnnnnnnnnnnnnnnnnnnnnnnnnnnnnnnnnnnnnnnnnnnnnnnnnnnnnnnnnnnnnnnnnnnnnnnnnnnnnnnnnnnnnnnnnnnnnnnnnnnnnnnnnnnnnnnnnnnnnnnnnnnnnnnnnnnnnnnnnnnnnnnnnnnnnnnnnnnnnnnnnnnnnnnnnnnnnnnnnnnnnnnnnnnnnnnnnnnnnnnnnnnnnnnnnnnnnnnnnnnnnnnnnnnnnnnnnnnnnnnnnnnnnnnnnnnnnnnnnnnnnnnnnnnnnnnnnnnnnnnnnnnnnnnnnnnnnnnnnnnnnnnnnnnnnnnnnnnnnnnnnnnnnnnnnnnnnnnnnnnnnnnnnnnnnnnnnnnnnnnnnnnnnnnnnnnnnnnnnnnnnnnnnnnnnnnnnnnnnnnnnnnnnnnnnnnnnnnnnnnnnnnnnnnnnnnnnnnnnnnnnnnnnnnnnnnnnnnnnnnnnnnnnnnnnnnnnnnnnnnnnnnnnnnnnnnnnnnnnnnnnnnnnnnnnnnnnnnnnnnnnnnnnnnnnnnnnnnnnnnnnnnnnnnnnnnnnnnnnnnnnnnnnnnnnnnnnnnnnnnnnnnnnnnnnnnnnnnnnnnnnnnnnnnnnnnnnnnnnnnnnnnnnnnnnnnnnnnnnnnnnnnnnnnnnnnnnnnnnnnnnnnnnnnnnnnnnnnnnnnnnnnnnnnnnnnnnnnnnnnnnnnnnnnnnnnnnnnnnnnnnnnnnnnnnnnnnnnnnnnnnnnnnnnnnnnnnnnnnnnnnnnnnnnnnnnnnnnnnnnnnnnnnnnnnnnnnnnnnnnnnnnnnnnnnnnnnnnnnnnnnnnnnnnnnnnnnnnnnnnnnnnnnnnnnnnnnnnnnnnnnnnnnnnnnnnnnnnnnnnnnnnnnnnnnnnnnnnnnnnnnnnnnnnnnnnnnnnnnnnnnnnnnnnnnnnnnnnnnnnnnnnnnnnnnnnnnnnnnnnnnnnnnnnnnnnnnnnnnnnnnnnnnnnnnnnnnnnnnnnnnnnnnnnnnnnnnnnnnnnnnnnnnnnnnnnnnnnnnnnnnnnnnnnnnnnnnnnnnnnnnnnnnnnnnnnnnnnnnnnnnnnnnnnnnnnnnnnnnnnnnnnnnnnnnnnnnnnnnnnnnnnnnnnnnnnnnnnnnnnnnnnnnnnnnnnnnnnnnnnnnnnnnnnnnnnnnnnnnnnnnnnnnnnnnnnnnnnnnnnnnnnnnnnnnnnnnnnnnnnnnnnnnnnnnnnnnnnnnnnnnnnnnnnnnnnnnnnnnnnnnnnnnnnnnnnnnnnnnnnnnnnnnnnnnnnnnnnnnnnnnnnnnnnnnnnnnnnnnnnnnnnnnnnnnnnnnnnnnnnnnnnnnnnnnnnnnnnnnnnnnnnnnnnnnnnnnnnnnnnnnnnnnnnnnnnnnnnnnnnnnnnnnnnnnnnnnnnnnnnnnnnnnnnnnnnnnnnnnnnnnnnnnnnnnnnnnnnnnnnnnnnnnnnnnnnnnnnnnnnnnnnnnnnnnnnnnnnnnnnnnnnnnnnnnnnnnnnnnnnnnnnnnnnnnnnnnnnnnnnnnnnnnnnnnnnnnnnnnnnnnnnnnnnnnnnnnnnnnnnnnnnnnnnnnnnnnnnnnnnnnnnnnnnnnnnnnnnnnnnnnnnnnnnnnnnnnnnnnnnnnnnnnnnnnnnnnnnnnnnnnnnnnnnnnnnnnnnnnnnnnnnnnnnnnnnnnnnnnnnnnnnnnnnnnnnnnnnnnnnnnnnnnnnnnnnnnnnnnnnnnnnnnnnnnnnnnnnnnnnnnnnnnnnnnnnnnnnnnnnnnnnnnnnnnnnnnnnnnnnnnnnnnnnnnnnnnnnnnnnnnnnnnnnnnnnnnnnnnnnnnnnnnnnnnnnnnnnnnnnnnnnnnnnnnnnnnnnnnnnnnnnnnnnnnnnnnnnnnnnnnnnnnnnnnnnnnnnnnnnnnnnnnnnnnnnnnnnnnnnnnnnnnnnnnnnnnnnnnnnnnnnnnnnnnnnnnnnnnnnnnnnnnnnnnnnnnnnnnnnnnnnnnnnnnnnnnnnnnnnnnnnnnnnnnnnnnnnnnnnnnnnnnnnnnnnnnnnnnnnnnnnnnnnnnnnnnnnnnnnnnnnnnnnnnnnnnnnnnnnnnnnnnnnnnnnnnnnnnnnnnnnnnnnnnnnnnnnnnnnnnnnnnnnnnnnnnnnnnnnnnnnnnnnnnnnnnnnnnnnnnnnnnnnnnnnnnnnnnnnnnnnnnnnnnnnnnnnnnnnnnnnnnnnnnnnnnnnnnnnnnnnnnnnnnnnnnnnnnnnnnnnnnnnnnnnnnnnnnnnnnnnnnnnnnnnnnnnnnnnnnnnnnnnnnnnnnnnnnnnnnnnnnnnnnnnnnnnnnnnnnnnnnnnnnnnnnnnnnnnnnnnnnnnnnnnnnnnnnnnnnnnnnnnnnnnnnnnnnnnnnnnnnnnnnnnnnnnnnnnnnnnnnnnnnnnnnnnnnnnnnnnnnnnnnnnnnnnnnnnnnnnnnnnnnnnnnnnnnnnnnnnnnnnnnnnnnnnnnnnnnnnnnnnnnnnnnnnnnnnnnnnnnnnnnnnnnnnnnnnnnnnnnnnnnnnnnnnnnnnnnnnnnnnnnnnnnnnnnnnnnnnnnnnnnnnnnnnnnnnnnnnnnnnnnnnnnnnnnnnnnnnnnnnnnnnnnnnnnnnnnnnnnnnnnnnnnnnnnnnnnnnnnnnnnnnnnnnnnnnnnnnnnnnnnnnnnnnnnnnnnnnnnnnnnnnnnnnnnnnnnnnnnnnnnnnnnnnnnnnnnnnnnnnnnnnnnnnnnnnnnnnnnnnnnnnnnnnnnnnnnnnnnnnnnnnnnnnnnnnnnnnnnnnnnnnnnnnnnnnnnnnnnnnnnnnnnnnnnnnnnnnnnnnnnnnnnnnnnnnnnnnnnnnnnnnnnnnnnnnnnnnnnnnnnnnnnnnnnnnnnnnnnnnnnnnnnnnnnnnnnnnnnnnnnnnnnnnnnnnnnnnnnnnnnnnnnnnnnnnnnnnnnnnnnnnnnnnnnnnnnnnnnnnnnnnnnnnnnnnnnnnnnnnnnnnnnnnnnnnnnnnnnnnnnnnnnnnnnnnnnnnnnnnnnnnnnnnnnnnnnnnnnnnnnnnnnnnnnnnnnnnnnnnnnnnnnnnnnnnnnnnnnnnnnnnnnnnnnnnnnnnnnnnnnnnnnnnnnnnnnnnnnnnnnnnnnnnnnnnnnnnnnnnnnnnnnnnnnnnnnnnnnnnnnnnnnnnnnnnnnnnnnnnnnnnnnnnnnnnnnnnnnnnnnnnnnnnnnnnnnnnnnnnnnnnnnnnnnnnnnnnnnnnnnnnnnnnnnnnnnnnnnnnnnnnnnnnnnnnnnnnnnnnnnnnnnnnnnnnnnnnnnnnnnnnnnnnnnnnnnnnnnnnnnnnnnnnnnnnnnnnnnnnnnnnnnnnnnnnnnnnnnnnnnnnnnnnnnnnnnnnnnnnnnnnnnnnnnnnnnnnnnnnnnnnnnnnnnnnnnnnnnnnnnnnnnnnnnnnnnnnnnnnnnnnnnnnnnnnnnnnnnnnnnnnnnnnnnnnnnnnnnnnnnnnnnnnnnnnnnnnnnnnnnnnnnnnnnnnnnnnnnnnnnnnnnnnnnnnnnnnnnnnnnnnnnnnnnnnnnnnnnnnnnnnnnnnnnnnnnnnnnnnnnnnnnnnnnnnnnnnnnnnnnnnnnnnnnnnnnnnnnnnnnnnnnnnnnnnnnnnnnnnnnnnnnnnnnnnnnnnnnnnnnnnnnnnnnnnnnnnnnnnnnnnnnnnnnnnnnnnnnnnnnnnnnnnnnnnnnnnnnnnnnnnnnnnnnnnnnnnnnnnnnnnnnnnnnnnnnnnnnnnnnnnnnnnnnnnnnnnnnnnnnnnnnnnnnnnnnnnnnnnnnnnnnnnnnnnnnnnnnnnnnnnnnnnnnnnnnnnnnnnnnnnnnnnnnnnnnnnnnnnnnnnnnnnnnnnnnnnnnnnnnnnnnnnnnnnnnnnnnnnnnnnnnnnnnnnnnnnnnnnnnnnnnnnnnnnnnnnnnnnnnnnnnnnnnnnnnnnnnnnnnnnnnnnnnnnnnnnnnnnnnnnnnnnnnnnnnnnnnnnnnnnnnnnnnnnnnnnnnnnnnnnnnnnnnnnnnnnnnnnnnnnnnnnnnnnnnnnnnnnnnnnnnnnnnnnnnnnnnnnnnnnnnnnnnnnnnnnnnnnnnnnnnnnnnnnnnnnnnnnnnnnnnnnnnnnnnnnnnnnnnnnnnnnnnnnnnnnnnnnnnnnnnnnnnnnnnnnnnnnnnnnnnnnnnnnnnnnnnnnnnnnnnnnnnnnnnnnnnnnnnnnnnnnnnnnnnnnnnnnnnnnnnnnnnnnnnnnnnnnnnnnnnnnnnnnnnnnnnnnnnnnnnnnnnnnnnnnnnnnnnnnnnnnnnnnnnnnnnnnnnnnnnnnnnnnnnnnnnnnnnnnnnnnnnnnnnnnnnnnnnnnnnnnnnnnnnnnnnnnnnnnnnnnnnnnnnnnnnnnnnnnnnnnnnnnnnnnnnnnnnnnnnnnnnnnnnnnnnnnnnnnnnnnnnnnnnnnnnnnnnnnnnnnnnnnnnnnnnnnnnnnnnnnnnnnnnnnnnnnnnnnnnnnnnnnnnnnnnnnnnnnnnnnnnnnnnnnnnnnnnnnnnnnnnnnnnnnnnnnnnnnnnnnnnnnnnnnnnnnnnnnnnnnnnnnnnnnnnnnnnnnnnnnnnnnnnnnnnnnnnnnnnnnnnnnnnnnnnnnnnnnnnnnnnnnnnnnnnnnnnnnnnnnnnnnnnnnnnnnnnnnnnnnnnnnnnnnnnnnnnnnnnnnnnnnnnnnnnnnnnnnnnnnnnnnnnnnnnnnnnnnnnnnnnnnnnnnnnnnnnnnnnnnnnnnnnnnnnnnnnnnnnnnnnnnnnnnnnnnnnnnnnnnnnnnnnnnnnnnnnnnnnnnnnnnnnnnnnnnnnnnnnnnnnnnnnnnnnnnnnnnnnnnnnnnnnnnnnnnnnnnnnnnnnnnnnnnnnnnnnnnnnnnnnnnnnnnnnnnnnnnnnnnnnnnnnnnnnnnnnnnnnnnnnnnnnnnnnnnnnnnnnnnnnnnnnnnnnnnnnnnnnnnnnnnnnnnnnnnnnnnnnnnnnnnnnnnnnnnnnnnnnnnnnnnnnnnnnnnnnnnnnnnnnnnnnnnnnnnnnnnnnnnnnnnnnnnnnnnnnnnnnnnnnnnnnnnnnnnnnnnnnnnnnnnnnnnnnnnnnnnnnnnnnnnnnnnnnnnnnnnnnnnnnnnnnnnnnnnnnnnnnnnnnnnnnnnnnnnnnnnnnnnnnnnnnnnnnnnnnnnnnnnnnnnnnnnnnnnnnnnnnnnnnnnnnnnnnnnnnnnnnnnnnnnnnnnnnnnnnnnnnnnnnnnnnnnnnnnnnnnnnnnnnnnnnnnnnnnnnnnnnnnnnnnnnnnnnnnnnnnnnnnnnnnnnnnnnnnnnnnnnnnnnnnnnnnnnnnnnnnnnnnnnnnnnnnnnnnnnnnnnnnnnnnnnnnnnnnnnnnnnnnnnnnnnnnnnnnnnnnnnnnnnnnnnnnnnnnnnnnnnnnnnnnnnnnnnnnnnnnnnnnnnnnnnnnnnnnnnnnnnnnnnnnnnnnnnnnnnnnnnnnnnnnnnnnnnnnnnnnnnnnnnnnnnnnnnnnnnnnnnnnnnnnnnnnnnnnnnnnnnnnnnnnnnnnnnnnnnnnnnnnnnnnnnnnnnnnnnnnnnnnnnnnnnnnnnnnnnnnnnnnnnnnnnnnnnnnnnnnnnnnnnnnnnnnnnnnnnnnnnnnnnnnnnnnnnnnnnnnnnnnnnnnnnnnnnnnnnnnnnnnnnnnnnnnnnnnnnnnnnnnnnnnnnnnnnnnnnnnnnnnnnnnnnnnnnnnnnnnnnnnnnnnnnnnnnnnnnnnnnnnnnnnnnnnnnnnnnnnnnnnnnnnnnnnnnnnnnnnnnnnnnnnnnnnnnnnnnnnnnnnnnnnnnnnnnnnnnnnnnnnnnnnnnnnnnnnnnnnnnnnnnnnnnnnnnnnnnnnnnnnnnnnnnnnnnnnnnnnnnnnnnnnnnnnnnnnnnnnnnnnnnnnnnnnnnnnnnnnnnnnnnnnnnnnnnnnnnnnnnnnnnnnnnnnnnnnnnnnnnnnnnnnnnnnnnnnnnnnnnnnnnnnnnnnnnnnnnnnnnnnnnnnnnnnnnnnnnnnnnnnnnnnnnnnnnnnnnnnnnnnnnnnnnnnnnnnnnnnnnnnnnnnnnnnnnnnnnnnnnnnnnnnnnnnnnnnnnnnnnnnnnnnnnnnnnnnnnnnnnnnnnnnnnnnnnnnnnnnnnnnnnnnnnnnnnnnnnnnnnnnnnnnnnnnnnnnnnnnnnnnnnnnnnnnnnnnnnnnnnnnnnnnnnnnnnnnnnnnnnnnnnnnnnnnnnnnnnnnnnnnnnnnnnnnnnnnnnnnnnnnnnnnnnnnnnnnnnnnnnnnnnnnnnnnnnnnnnnnnnnnnnnnnnnnnnnnnnnnnnnnnnnnnnnnnnnnnnnnnnnnnnnnnnnnnnnnnnnnnnnnnnnnnnnnnnnnnnnnnnnnnnnnnnnnnnnnnnnnnnnnnnnnnnnnnnnnnnnnnnnnnnnnnnnnnnnnnnnnnnnnnnnnnnnnnnnnnnnnnnnnnnnnnnnnnnnnnnnnnnnnnnnnnnnnnnnnnnnnnnnnnnnnnnnnnnnnnnnnnnnnnnnnnnnnnnnnnnnnnnnnnnnnnnnnnnnnnnnnnnnnnnnnnnnnnnnnnnnnnnnnnnnnnnnnnnnnnnnnnnnnnnnnnnnnnnnnnnnnnnnnnnnnnnnnnnnnnnnnnnnnnnnnnnnnnnnnnnnnnnnnnnnnnnnnnnnnnnnnnnnnnnnnnnnnnnnnnnnnnnnnnnnnnnnnnnnnnnnnnnnnnnnnnnnnnnnnnnnnnnnnnnnnnnnnnnnnnnnnnnnnnnnnnnnnnnnnnnnnnnnnnnnnnnnnnnnnnnnnnnnnnnnnnnnnnnnnnnnnnnnnnnnnnnnnnnnnnnnnnnnnnnnnnnnnnnnnnnnnnnnnnnnnnnnnnnnnnnnnnnnnnnnnnnnnnnnnnnnnnnnnnnnnnnnnnnnnnnnnnnnnnnnnnnnnnnnnnnnnnnnnnnnnnnnnnnnnnnnnnnnnnnnnnnnnnnnnnnnnnnnnnnnnnnnnnnnnnnnnnnnnnnnnnnnnnnnnnnnnnnnnnnnnnnnnnnnnnnnnnnnnnnnnnnnnnnnnnnnnnnnnnnnnnnnnnnnnnnnnnnnnnnnnnnnnnnnnnnnnnnnnnnnnnnnnnnnnnnnnnnnnnnnnnnnnnnnnnnnnnnnnnnnnnnnnnnnnnnnnnnnnnnnnnnnnnnnnnnnnnnnnnnnnnnnnnnnnnnnnnnnnnnnnnnnnnnnnnnnnnnnnnnnnnnnnnnnnnnnnnnnnnnnnnnnnnnnnnnnnnnnnnnnnnnnnnnnnnnnnnnnnnnnnnnnnnnnnnnnnnnnnnnnnnnnnnnnnnnnnnnnnnnnnnnnnnnnnnnnnnnnnnnnnnnnnnnnnnnnnnnnnnnnnnnnnnnnnnnnnnnnnnnnnnnnnnnnnnnnnnnnnnnnnnnnnnnnnnnnnnnnnnnnnnnnnnnnnnnnnnnnnnnnnnnnnnnnnnnnnnnnnnnnnnnnnnnnnnnnnnnnnnnnnnnnnnnnnnnnnnnnnnnnnnnnnnnnnnnnnnnnnnnnnnnnnnnnnnnnnnnnnnnnnnnnnnnnnnnnnnnnnnnnnnnnnnnnnnnnnnnnnnnnnnnnnnnnnnnnnnnnnnnnnnnnnnnnnnnnnnnnnnnnnnnnnnnnnnnnnnnnnnnnnnnnnnnnnnnnnnnnnnnnnnnnnnnnnnnnnnnnnnnnnnnnnnnnnnnnnnnnnnnnnnnnnnnnnnnnnnnnnnnnnnnnnnnnnnnnnnnnnnnnnnnnnnnnnnnnnnnnnnnnnnnnnnnnnnnnnnnnnnnnnnnnnnnnnnnnnnnnnnnnnnnnnnnnnnnnnnnnnnnnnnnnnnnnnnnnnnnnnnnnnnnnnnnnnnnnnnnnnnnnnnnnnnnnnnnnnnnnnnnnnnnnnnnnnnnnnnnnnnnnnnnnnnnnnnnnnnnnnnnnnnnnnnnnnnnnnnnnnnnnnnnnnnnnnnnnnnnnnnnnnnnnnnnnnnnnnnnnnnnnnnnnnnnnnnnnnnnnnnnnnnnnnnnnnnnnnnnnnnnnnnnnnnnnnnnnnnnnnnnnnnnnnnnnnnnnnnnnnnnnnnnnnnnnnnnnnnnnnnnnnnnnnnnnnnnnnnnnnnnnnnnnnnnnnnnnnnnnnnnnnnnnnnnnnnnnnnnnnnnnnnnnnnnnnnnnnnnnnnnnnnnnnnnnnnnnnnnnnnnnnnnnnnnnnnnnnnnnnnnnnnnnnnnnnnnnnnnnnnnnnnnnnnnnnnnnnnnnnnnnnnnnnnnnnnnnnnnnnnnnnnnnnnnnnnnnnnnnnnnnnnnnnnnnnnnnnnnnnnnnnnnnnnnnnnnnnnnnnnnnnnnnnnnnnnnnnnnnnnnnnnnnnnnnnnnnnnnnnnnnnnnnnnnnnnnnnnnnnnnnnnnnnnnnnnnnnnnnnnnnnnnnnnnnnnnnnnnnnnnnnnnnnnnnnnnnnnnnnnnnnnnnnnnnnnnnnnnnnnnnnnnnnnnnnnnnnnnnnnnnnnnnnnnnnnnnnnnnnnnnnnnnnnnnnnnnnnnnnnnnnnnnnnnnnnnnnnnnnnnnnnnnnnnnnnnnnnnnnnnnnnnnnnnnnnnnnnnnnnnnnnnnnnnnnnnnnnnnnnnnnnnnnnnnnnnnnnnnnnnnnnnnnnnnnnnnnnnnnnnnnnnnnnnnnnnnnnnnnnnnnnnnnnnnnnnnnnnnnnnnnnnnnnnnnnnnnnnnnnnnnnnnnnnnnnnnnnnnnnnnnnnnnnnnnnnnnnnnnnnnnnnnnnnnnnnnnnnnnnnnnnnnnnnnnnnnnnnnnnnnnnnnnnnnnnnnnnnnnnnnnnnnnnnnnnnnnnnnnnnnnnnnnnnnnnnnnnnnnnnnnnnnnnnnnnnnnnnnnnnnnnnnnnnnnnnnnnnnnnnnnnnnnnnnnnnnnnnnnnnnnnnnnnnnnnnnnnnnnnnnnnnnnnnnnnnnnnnnnnnnnnnnnnnnnnnnnnnnnnnnnnnnnnnnnnnnnnnnnnnnnnnnnnnnnnnnnnnnnnnnnnnnnnnnnnnnnnnnnnnnnnnnnnnnnnnnnnnnnnnnnnnnnnnnnnnnnnnnnnnnnnnnnnnnnnnnnnnnnnnnnnnnnnnnnnnnnnnnnnnnnnnnnnnnnnnnnnnnnnnnnnnnnnnnnnnnnnnnnnnnnnnnnnnnnnnnnnnnnnnnnnnnnnnnnnnnnnnnnnnnnnnnnnnnnnnnnnnnnnnnnnnnnnnnnnnnnnnnnnnnnnnnnnnnnnnnnnnnnnnnnnnnnnnnnnnnnnnnnnnnnnnnnnnnnnnnnnnnnnnnnnnnnnnnnnnnnnnnnnnnnnnnnnnnnnnnnnnnnnnnnnnnnnnnnnnnnnnnnnnnnnnnnnnnnnnnnnnnnnnnnnnnnnnnnnnnnnnnnnnnnnnnnnnnnnnnnnnnnnnnnnnnnnnnnnnnnnnnnnnnnnnnnnnnnnnnnnnnnnnnnnnnnnnnnnnnnnnnnnnnnnnnnnnnnnnnnnnnnnnnnnnnnnnnnnnnnnnnnnnnnnnnnnnnnnnnnnnnnnnnnnnnnnnnnnnnnnnnnnnnnnnnnnnnnnnnnnnnnnnnnnnnnnnnnnnnnnnnnnnnnnnnnnnnnnnnnnnnnnnnnnnnnnnnnnnnnnnnnnnnnnnnnnnnnnnnnnnnnnnnnnnnnnnnnnnnnnnnnnnnnnnnnnnnnnnnnnnnnnnnnnnnnnnnnnnnnnnnnnnnnnnnnnnnnnnnnnnnnnnnnnnnnnnnnnnnnnnnnnnnnnnnnnnnnnnnnnnnnnnnnnnnnnnnnnnnnnnnnnnnnnnnnnnnnnnnnnnnnnnnnnnnnnnnnnnnnnnnnnnnnnnnnnnnnnnnnnnnnnnnnnnnnnnnnnnnnnnnnnnnnnnnnnnnnnnnnnnnnnnnnnnnnnnnnnnnnnnnnnnnnnnnnnnnnnnnnnnnnnnnnnnnnnnnnnnnnnnnnnnnnnnnnnnnnnnnnnnnnnnnnnnnnnnnnnnnnnnnnnnnnnnnnnnnnnnnnnnnnnnnnnnnnnnnnnnnnnnnnnnnnnnnnnnnnnnnnnnnnnnnnnnnnnnnnnnnnnnnnnnnnnnnnnnnnnnnnnnnnnnnnnnnnnnnnnnnnnnnnnnnnnnnnnnnnnnnnnnnnnnnnnnnnnnnnnnnnnnnnnnnnnnnnnnnnnnnnnnnnnnnnnnnnnnnnnnnnnnnnnnnnnnnnnnnnnnnnnnnnnnnnnnnnnnnnnnnnnnnnnnnnnnnnnnnnnnnnnnnnnnnnnnnnnnnnnnnnnnnnnnnnnnnnnnnnnnnnnnnnnnnnnnnnnnnnnnnnnnnnnnnnnnnnnnnnnnnnnnnnnnnnnnnnnnnnnnnnnnnnnnnnnnnnnnnnnnnnnnnnnnnnnnnnnnnnnnnnnnnnnnnnnnnnnnnnnnnnnnnnnnnnnnnnnnnnnnnnnnnnnnnnnnnnnnnnnnnnnnnnnnnnnnnnnnnnnnnnnnnnnnnnnnnnnnnnnnnnnnnnnnnnnnnnnnnnnnnnnnnnnnnnnnnnnnnnnnnnnnnnnnnnnnnnnnnnnnnnnnnnnnnnnnnnnnnnnnnnnnnnnnnnnnnnnnnnnnnnnnnnnnnnnnnnnnnnnnnnnnnnnnnnnnnnnnnnnnnnnnnnnnnnnnnnnnnnnnnnnnnnnnnnnnnnnnnnnnnnnnnnnnnnnnnnnnnnnnnnnnnnnnnnnnnnnnnnnnnnnnnnnnnnnnnnnnnnnnnnnnnnnnnnnnnnnnnnnnnnnnnnnnnnnnnnnnnnnnnnnnnnnnnnnnnnnnnnnnnnnnnnnnnnnnnnnnnnnnnnnnnnnnnnnnnnnnnnnnnnnnnnnnnnnnnnnnnnnnnnnnnnnnnnnnnnnnnnnnnnnnnnnnnnnnnnnnnnnnnnnnnnnnnnnnnnnnnnnnnnnnnnnnnnnnnnnnnnnnnnnnnnnnnnnnnnnnnnnnnnnnnnnnnnnnnnnnnnnnnnnnnnnnnnnnnnnnnnnnnnnnnnnnnnnnnnnnnnnnnnnnnnnnnnnnnnnnnnnnnnnnnnnnnnnnnnnnnnnnnnnnnnnnnnnnnnnnnnnnnnnnnnnnnnnnnnnnnnnnnnnnnnnnnnnnnnnnnnnnnnnnnnnnnnnnnnnnnnnnnnnnnnnnnnnnnnnnnnnnnnnnnnnnnnnnnnnnnnnnnnnnnnnnnnnnnnnnnnnnnnnnnnnnnnnnnnnnnnnnnnnnnnnnnnnnnnnnnnnnnnnnnnnnnnnnnnnnnnnnnnnnnnnnnnnnnnnnnnnnnnnnnnnnnnnnnnnnnnnnnnnnnnnnnnnnnnnnnnnnnnnnnnnnnnnnnnnnnnnnnnnnnnnnnnnnnnnnnnnnnnnnnnnnnnnnnnnnnnnnnnnnnnnnnnnnnnnnnnnnnnnnnnnnnnnnnnnnnnnnnnnnnnnnnnnnnnnnnnnnnnnnnnnnnnnnnnnnnnnnnnnnnnnnnnnnnnnnnnnnnnnnnnnnnnnnnnnnnnnnnnnnnnnnnnnnnnnnnnnnnnnnnnnnnnnnnnnnnnnnnnnnnnnnnnnnnnnnnnnnnnnnnnnnnnnnnnnnnnnnnnnnnnnnnnnnnnnnnnnnnnnnnnnnnnnnnnnnnnnnnnnnnnnnnnnnnnnnnnnnnnnnnnnnnnnnnnnnnnnnnnnnnnnnnnnnnnnnnnnnnnnnnnnnnnnnnnnnnnnnnnnnnnnnnnnnnnnnnnnnnnnnnnnnnnnnnnnnnnnnnnnnnnnnnnnnnnnnnnnnnnnnnnnnnnnnnnnnnnnnnnnnnnnnnnnnnnnnnnnnnnnnnnnnnnnnnnnnnnnnnnnnnnnnnnnnnnnnnnnnnnnnnnnnnnnnnnnnnnnnnnnnnnnnnnnnnnnnnnnnnnnnnnnnnnnnnnnnnnnnnnnnnnnnnnnnnnnnnnnnnnnnnnnnnnnnnnnnnnnnnnnnnnnnnnnnnnnnnnnnnnnnnnnnnnnnnnnnnnnnnnnnnnnnnnnnnnnnnnnnnnnnnnnnnnnnnnnnnnnnnnnnnnnnnnnnnnnnnnnnnnnnnnnnnnnnnnnnnnnnnnnnnnnnnnnnnnnnnnnnnnnnnnnnnnnnnnnnnnnnnnnnnnnnnnnnnnnnnnnnnnnnnnnnnnnnnnnnnnnnnnnnnnnnnnnnnnnnnnnnnnnnnnnnnnnnnnnnnnnnnnnnnnnnnnnnnnnnnnnnnnnnnnnnnnnnnnnnnnnnnnnnnnnnnnnnnnnnnnnnnnnnnnnnnnnnnnnnnnnnnnnnnnnnnnnnnnnnnnnnnnnnnnnnnnnnnnnnnnnnnnnnnnnnnnnnnnnnnnnnnnnnnnnnnnnnnnnnnnnnnnnnnnnnnnnnnnnnnnnnnnnnnnnnnnnnnnnnnnnnnnnnnnnnnnnnnnnnnnnnnnnnnnnnnnnnnnnnnnnnnnnnnnnnnnnnnnnnnnnnnnnnnnnnnnnnnnnnnnnnnnnnnnnnnnnnnnnnnnnnnnnnnnnnnnnnnnnnnnnnnnnnnnnnnnnnnnnnnnnnnnnnnnnnnnnnnnnnnnnnnnnnnnnnnnnnnnnnnnnnnnnnnnnnnnnnnnnnnnnnnnnnnnnnnnnnnnnnnnnnnnnnnnnnnnnnnnnnnnnnnnnnnnnnnnnnnnnnnnnnnnnnnnnnnnnnnnnnnnnnnnnnnnnnnnnnnnnnnnnnnnnnnnnnnnnnnnnnnnnnnnnnnnnnnnnnnnnnnnnnnnnnnnnnnnnnnnnnnnnnnnnnnnnnnnnnnnnnnnnnnnnnnnnnnnnnnnnnnnnnnnnnnnnnnnnnnnnnnnnnnnnnnnnnnnnnnnnnnnnnnnnnnnnnnnnnnnnnnnnnnnnnnnnnnnnnnnnnnnnnnnnnnnnnnnnnnnnnnnnnnnnnnnnnnnnnnnnnnnnnnnnnnnnnnnnnnnnnnnnnnnnnnnnnnnnnnnnnnnnnnnnnnnnnnnnnnnnnnnnnnnnnnnnnnnnnnnnnnnnnnnnnnnnnnnnnnnnnnnnnnnnnnnnnnnnnnnnnnnnnnnnnnnnnnnnnnnnnnnnnnnnnnnnnnnnnnnnnnnnnnnnnnnnnnnnnnnnnnnnnnnnnnnnnnnnnnnnnnnnnnnnnnnnnnnnnnnnnnnnnnnnnnnnnnnnnnnnnnnnnnnnnnnnnnnnnnnnnnnnnnnnnnnnnnnnnnnnnnnnnnnnnnnnnnnnnnnnnnnnnnnnnnnnnnnnnnnnnnnnnnnnnnnnnnnnnnnnnnnnnnnnnnnnnnnnnnnnnnnnnnnnnnnnnnnnnnnnnnnnnnnnnnnnnnnnnnnnnnnnnnnnnnnnnnnnnnnnnnnnnnnnnnnnnnnnnnnnnnnnnnnnnnnnnnnnnnnnnnnnnnnnnnnnnnnnnnnnnnnnnnnnnnnnnnnnnnnnnnnnnnnnnnnnnnnnnnnnnnnnnnnnnnnnnnnnnnnnnnnnnnnnnnnnnnnnnnnnnnnnnnnnnnnnnnnnnnnnnnnnnnnnnnnnnnnnnnnnnnnnnnnnnnnnnnnnnnnnnnnnnnnnnnnnnnnnnnnnnnnnnnnnnnnnnnnnnnnnnnnnnnnnnnnnnnnnnnnnnnnnnnnnnnnnnnnnnnnnnnnnnnnnnnnnnnnnnnnnnnnnnnnnnnnnnnnnnnnnnnnnnnnnnnnnnnnnnnnnnnnnnnnnnnnnnnnnnnnnnnnnnnnnnnnnnnnnnnnnnnnnnnnnnnnnnnnnnnnnnnnnnnnnnnnnnnnnnnnnnnnnnnnnnnnnnnnnnnnnnnnnnnnnnnnnnnnnnnnnnnnnnnnnnnnnnnnnnnnnnnnnnnnnnnnnnnnnnnnnnnnnnnnnnnnnnnnnnnnnnnnnnnnnnnnnnnnnnnnnnnnnnnnnnnnnnnnnnnnnnnnnnnnnnnnnnnnnnnnnnnnnnnnnnnnnnnnnnnnnnnnnnnnnnnnnnnnnnnnnnnnnnnnnnnnnnnnnnnnnnnnnnnnnnnnnnnnnnnnnnnnnnnnnnnnnnnnnnnnnnnnnnnnnnnnnnnnnnnnnnnnnnnnnnnnnnnnnnnnnnnnnnnnnnnnnnnnnnnnnnnnnnnnnnnnnnnnnnnnnnnnnnnnnnnnnnnnnnnnnnnnnnnnnnnnnnnnnnnnnnnnnnnnnnnnnnnnnnnnnnnnnnnnnnnnnnnnnnnnnnnnnnnnnnnnnnnnnnnnnnnnnnnnnnnnnnnnnnnnnnnnnnnnnnnnnnnnnnnnnnnnnnnnnnnnnnnnnnnnnnnnnnnnnnnnnnnnnnnnnnnnnnnnnnnnnnnnnnnnnnnnnnnnnnnnnnnnnnnnnnnnnnnnnnnnnnnnnnnnnnnnnnnnnnnnnnnnnnnnnnnnnnnnnnnnnnnnnnnnnnnnnnnnnnnnnnnnnnnnnnnnnnnnnnnnnnnnnnnnnnnnnnnnnnnnnnnnnnnnnnnnnnnnnnnnnnnnnnnnnnnnnnnnnnnnnnnnnnnnnnnnnnnnnnnnnnnnnnnnnnnnnnnnnnnnnnnnnnnnnnnnnnnnnnnnnnnnnnnnnnnnnnnnnnnnnnnnnnnnnnnnnnnnnnnnnnnnnnnnnnnnnnnnnnnnnnnnnnnnnnnnnnnnnnnnnnnnnnnnnnnnnnnnnnnnnnnnnnnnnnnnnnnnnnnnnnnnnnnnnnnnnnnnnnnnnnnnnnnnnnnnnnnnnnnnnnnnnnnnnnnnnnnnnnnnnnnnnnnnnnnnnnnnnnnnnnnnnnnnnnnnnnnnnnnnnnnnnnnnnnnnnnnnnnnnnnnnnnnnnnnnnnnnnnnnnnnnnnnnnnnnnnnnnnnnnnnnnnnnnnnnnnnnnnnnnnnnnnnnnnnnnnnnnnnnnnnnnnnnnnnnnnnnnnnnnnnnnnnnnnnnnnnnnnnnnnnnnnnnnnnnnnnnnnnnnnnnnnnnnnnnnnnnnnnnnnnnnnnnnnnnnnnnnnnnnnnnnnnnnnnnnnnnnnnnnnnnnnnnnnnnnnnnnnnnnnnnnnnnnnnnnnnnnnnnnnnnnnnnnnnnnnnnnnnnnnnnnnnnnnnnnnnnnnnnnnnnnnnnnnnnnnnnnnnnnnnnnnnnnnnnnnnnnnnnnnnnnnnnnnnnnnnnnnnnnnnnnnnnnnnnnnnnnnnnnnnnnnnnnnnnnnnnnnnnnnnnnnnnnnnnnnnnnnnnnnnnnnnnnnnnnnnnnnnnnnnnnnnnnnnnnnnnnnnnnnnnnnnnnnnnnnnnnnnnnnnnnnnnnnnnnnnnnnnnnnnnnnnnnnnnnnnnnnnnnnnnnnnnnnnnnnnnnnnnnnnnnnnnnnnnnnnnnnnnnnnnnnnnnnnnnnnnnnnnnnnnnnnnnnnnnnnnnnnnnnnnnnnnnnnnnnnnnnnnnnnnnnnnnnnnnnnnnnnnnnnnnnnnnnnnnnnnnnnnnnnnnnnnnnnnnnnnnnnnnnnnnnnnnnnnnnnnnnnnnnnnnnnnnnnnnnnnnnnnnnnnnnnnnnnnnnnnnnnnnnnnnnnnnnnnnnnnnnnnnnnnnnnnnnnnnnnnnnnnnnnnnnnnnnnnnnnnnnnnnnnnnnnnnnnnnnnnnnnnnnnnnnnnnnnnnnnnnnnnnnnnnnnnnnnnnnnnnnnnnnnnnnnnnnnnnnnnnnnnnnnnnnnnnnnnnnnnnnnnnnnnnnnnnnnnnnnnnnnnnnnnnnnnnnnnnnnnnnnnnnnnnnnnnnnnnnnnnnnnnnnnnnnnnnnnnnnnnnnnnnnnnnnnnnnnnnnnnnnnnnnnnnnnnnnnnnnnnnnnnnnnnnnnnnnnnnnnnnnnnnnnnnnnnnnnnnnnnnnnnnnnnnnnnnnnnnnnnnnnnnnnnnnnnnnnnnnnnnnnnnnnnnnnnnnnnnnnnnnnnnnnnnnnnnnnnnnnnnnnnnnnnnnnnnnnnnnnnnnnnnnnnnnnnnnnnnnnnnnnnnnnnnnnnnnnnnnnnnnnnnnnnnnnnnnnnnnnnnnnnnnnnnnnnnnnnnnnnnnnnnnnnnnnnnnnnnnnnnnnnnnnnnnnnnnnnnnnnnnnnnnnnnnnnnnnnnnnnnnnnnnnnnnnnnnnnnnnnnnnnnnnnnnnnnnnnnnnnnnnnnnnnnnnnnnnnnnnnnnnnnnnnnnnnnnnnnnnnnnnnnnnnnnnnnnnnnnnnnnnnnnnnnnnnnnnnnnnnnnnnnnnnnnnnnnnnnnnnnnnnnnnnnnnnnnnnnnnnnnnnnnnnnnnnnnnnnnnnnnnnnnnnnnnnnnnnnnnnnnnnnnnnnnnnnnnnnnnnnnnnnnnnnnnnnnnnnnnnnnnnnnnnnnnnnnnnnnnnnnnnnnnnnnnnnnnnnnnnnnnnnnnnnnnnnnnnnnnnnnnnnnnnnnnnnnnnnnnnnnnnnnnnnnnnnnnnnnnnnnnnnnnnnnnnnnnnnnnnnnnnnnnnnnnnnnnnnnnnnnnnnnnnnnnnnnnnnnnnnnnnnnnnnnnnnnnnnnnnnnnnnnnnnnnnnnnnnnnnnnnnnnnnnnnnnnnnnnnnnnnnnnnnnnnnnnnnnnnnnnnnnnnnnnnnnnnnnnnnnnnnnnnnnnnnnnnnnnnnnnnnnnnnnnnnnnnnnnnnnnnnnnnnnnnnnnnnnnnnnnnnnnnnnnnnnnnnnnnnnnnnnnnnnnnnnnnnnnnnnnnnnnnnnnnnnnnnnnnnnnnnnnnnnnnnnnnnnnnnnnnnnnnnnnnnnnnnnnnnnnnnnnnnnnnnnnnnnnnnnnnnnnnnnnnnnnnnnnnnnnnnnnnnnnnnnnnnnnnnnnnnnnnnnnnnnnnnnnnnnnnnnnnnnnnnnnnnnnnnnnnnnnnnnnnnnnnnnnnnnnnnnnnnnnnnnnnnnnnnnnnnnnnnnnnnnnnnnnnnnnnnnnnnnnnnnnnnnnnnnnnnnnnnnnnnnnnnnnnnnnnnnnnnnnnnnnnnnnnnnnnnnnnnnnnnnnnnnnnnnnnnnnnnnnnnnnnnnnnnnnnnnnnnnnnnnnnnnnnnnnnnnnnnnnnnnnnnnnnnnnnnnnnnnnnnnnnnnnnnnnnnnnnnnnnnnnnnnnnnnnnnnnnnnnnnnnnnnnnnnnnnnnnnnnnnnnnnnnnnnnnnnnnnnnnnnnnnnnnnnnnnnnnnnnnnnnnnnnnnnnnnnnnnnnnnnnnnnnnnnnnnnnnnnnnnnnnnnnnnnnnnnnnnnnnnnnnnnnnnnnnnnnnnnnnnnnnnnnnnnnnnnnnnnnnnnnnnnnnnnnnnnnnnnnnnnnnnnnnnnnnnnnnnnnnnnnnnnnnnnnnnnnnnnnnnnnnnnnnnnnnnnnnnnnnnnnnnnnnnnnnnnnnnnnnnnnnnnnnnnnnnnnnnnnnnnnnnnnnnnnnnnnnnnnnnnnnnnnnnnnnnnnnnnnnnnnnnnnnnnnnnnnnnnnnnnnnnnnnnnnnnnnnnnnnnnnnnnnnnnnnnnnnnnnnnnnnnnnnnnnnnnnnnnnnnnnnnnnnnnnnnnnnnnnnnnnnnnnnnnnnnnnnnnnnnnnnnnnnnnnnnnnnnnnnnnnnnnnnnnnnnnnnnnnnnnnnnnnnnnnnnnnnnnnnnnnnnnnnnnnnnnnnnnnnnnnnnnnnnnnnnnnnnnnnnnnnnnnnnnnnnnnnnnnnnnnnnnnnnnnnnnnnnnnnnnnnnnnnnnnnnnnnnnnnnnnnnnnnnnnnnnnnnnnnnnnnnnnnnnnnnnnnnnnnnnnnnnnnnnnnnnnnnnnnnnnnnnnnnnnnnnnnnnnnnnnnnnnnnnnnnnnnnnnnnnnnnnnnnnnnnnnnnnnnnnnnnnnnnnnnnnnnnnnnnnnnnnnnnnnnnnnnnnnnnnnnnnnnnnnnnnnnnnnnnnnnnnnnnnnnnnnnnnnnnnnnnnnnnnnnnnnnnnnnnnnnnnnnnnnnnnnnnnnnnnnnnnnnnnnnnnnnnnnnnnnnnnnnnnnnnnnnnnnnnnnnnnnnnnnnnnnnnnnnnnnnnnnnnnnnnnnnnnnnnnnnnnnnnnnnnnnnnnnnnnnnnnnnnnnnnnnnnnnnnnnnnnnnnnnnnnnnnnnnnnnnnnnnnnnnnnnnnnnnnnnnnnnnnnnnnnnnnnnnnnnnnnnnnnnnnnnnnnnnnnnnnnnnnnnnnnnnnnnnnnnnnnnnnnnnnnnnnnnnnnnnnnnnnnnnnnnnnnnnnnnnnnnnnnnnnnnnnnnnnnnnnnnnnnnnnnnnnnnnnnnnnnnnnnnnnnnnnnnnnnnnnnnnnnnnnnnnnnnnnnnnnnnnnnnnnnnnnnnnnnnnnnnnnnnnnnnnnnnnnnnnnnnnnnnnnnnnnnnnnnnnnnnnnnnnnnnnnnnnnnnnnnnnnnnnnnnnnnnnnnnnnnnnnnnnnnnnnnnnnnnnnnnnnnnnnnnnnnnnnnnnnnnnnnnnnnnnnnnnnnnnnnnnnnnnnnnnnnnnnnnnnnnnnnnnnnnnnnnnnnnnnnnnnnnnnnnnnnnnnnnnnnnnnnnnnnnnnnnnnnnnnnnnnnnnnnnnnnnnnnnnnnnnnnnnnnnnnnnnnnnnnnnnnnnnnnnnnnnnnnnnnnnnnnnnnnnnnnnnnnnnnnnnnnnnnnnnnnnnnnnnnnnnnnnnnnnnnnnnnnnnnnnnnnnnnnnnnnnnnnnnnnnnnnnnnnnnnnnnnnnnnnnnnnnnnnnnnnnnnnnnnnnnnnnnnnnnnnnnnnnnnnnnnnnnnnnnnnnnnnnnnnnnnnnnnnnnnnnnnnnnnnnnnnnnnnnnnnnnnnnnnnnnnnnnnnnnnnnnnnnnnnnnnnnnnnnnnnnnnnnnnnnnnnnnnnnnnnnnnnnnnnnnnnnnnnnnnnnnnnnnnnnnnnnnnnnnnnnnnnnnnnnnnnnnnnnnnnnnnnnnnnnnnnnnnnnnnnnnnnnnnnnnnnnnnnnnnnnnnnnnnnnnnnnnnnnnnnnnnnnnnnnnnnnnnnnnnnnnnnnnnnnnnnnnnnnnnnnnnnnnnnnnnnnnnnnnnnnnnnnnnnnnnnnnnnnnnnnnnnnnnnnnnnnnnnnnnnnnnnnnnnnnnnnnnnnnnnnnnnnnnnnnnnnnnnnnnnnnnnnnnnnnnnnnnnnnnnnnnnnnnnnnnnnnnnnnnnnnnnnnnnnnnnnnnnnnnnnnnnnnnnnnnnnnnnnnnnnnnnnnnnnnnnnnnnnnnnnnnnnnnnnnnnnnnnnnnnnnnnnnnnnnnnnnnnnnnnnnnnnnnnnnnnnnnnnnnnnnnnnnnnnnnnnnnnnnnnnnnnnnnnnnnnnnnnnnnnnnnnnnnnnnnnnnnnnnnnnnnnnnnnnnnnnnnnnnnnnnnnnnnnnnnnnnnnnnnnnnnnnnnnnnnnnnnnnnnnnnnnnnnnnnnnnnnnnnnnnnnnnnnnnnnnnnnnnnnnnnnnnnnnnnnnnnnnnnnnnnnnnnnnnnnnnnnnnnnnnnnnnnnnnnnnnnnnnnnnnnnnnnnnnnnnnnnnnnnnnnnnnnnnnnnnnnnnnnnnnnnnnnnnnnnnnnnnnnnnnnnnnnnnnnnnnnnnnnnnnnnnnnnnnnnnnnnnnnnnnnnnnnnnnnnnnnnnnnnnnnnnnnnnnnnnnnnnnnnnnnnnnnnnnnnnnnnnnnnnnnnnnnnnnnnnnnnnnnnnnnnnnnnnnnnnnnnnnnnnnnnnnnnnnnnnnnnnnnnnnnnnnnnnnnnnnnnnnnnnnnnnnnnnnnnnnnnnnnnnnnnnnnnnnnnnnnnnnnnnnnnnnnnnnnnnnnnnnnnnnnnnnnnnnnnnnnnnnnnnnnnnnnnnnnnnnnnnnnnnnnnnnnnnnnnnnnnnnnnnnnnnnnnnnnnnnnnnnnnnnnnnnnnnnnnnnnnnnnnnnnnnnnnnnnnnnnnnnnnnnnnnnnnnnnnnnnnnnnnnnnnnnnnnnnnnnnnnnnnnnnnnnnnnnnnnnnnnnnnnnnnnnnnnnnnnnnnnnnnnnnnnnnnnnnnnnnnnnnnnnnnnnnnnnnnnnnnnnnnnnnnnnnnnnnnnnnnnnnnnnnnnnnnnnnnnnnnnnnnnnnnnnnnnnnnnnnnnnnnnnnnnnnnnnnnnnnnnnnnnnnnnnnnnnnnnnnnnnnnnnnnnnnnnnnnnnnnnnnnnnnnnnnnnnnnnnnnnnnnnnnnnnnnnnnnnnnnnnnnnnnnnnnnnnnnnnnnnnnnnnnnnnnnnnnnnnnnnnnnnnnnnnnnnnnnnnnnnnnnnnnnnnnnnnnnnnnnnnnnnnnnnnnnnnnnnnnnnnnnnnnnnnnnnnnnnnnnnnnnnnnnnnnnnnnnnnnnnnnnnnnnnnnnnnnnnnnnnnnnnnnnnnnnnnnnnnnnnnnnnnnnnnnnnnnnnnnnnnnnnnnnnnnnnnnnnnnnnnnnnnnnnnnnnnnnnnnnnnnnnnnnnnnnnnnnnnnnnnnnnnnnnnnnnnnnnnnnnnnnnnnnnnnnnnnnnnnnnnnnnnnnnnnnnnnnnnnnnnnnnnnnnnnnnnnnnnnnnnnnnnnnnnnnnnnnnnnnnnnnnnnnnnnnnnnnnnnnnnnnnnnnnnnnnnnnnnnnnnnnnnnnnnnnnnnnnnnnnnnnnnnnnnnnnnnnnnnnnnnnnnnnnnnnnnnnnnnnnnnnnnnnnnnnnnnnnnnnnnnnnnnnnnnnnnnnnnnnnnnnnnnnnnnnnnnnnnnnnnnnnnnnnnnnnnnnnnnnnnnnnnnnnnnnnnnnnnnnnnnnnnnnnnnnnnnnnnnnnnnnnnnnnnnnnnnnnnnnnnnnnnnnnnnnnnnnnnnnnnnnnnnnnnnnnnnnnnnnnnnnnnnnnnnnnnnnnnnnnnnnnnnnnnnnnnnnnnnnnnnnnnnnnnnnnnnnnnnnnnnnnnnnnnnnnnnnnnnnnnnnnnnnnnnnnnnnnnnnnnnnnnnnnnnnnnnnnnnnnnnnnnnnnnnnnnnnnnnnnnnnnnnnnnnnnnnnnnnnnnnnnnnnnnnnnnnnnnnnnnnnnnnnnnnnnnnnnnnnnnnnnnnnnnnnnnnnnnnnnnnnnnnnnnnnnnnnnnnnnnnnnnnnnnnnnnnnnnnnnnnnnnnnnnnnnnnnnnnnnnnnnnnnnnnnnnnnnnnnnnnnnnnnnnnnnnnnnnnnnnnnnnnnnnnnnnnnnnnnnnnnnnnnnnnnnnnnnnnnnnnnnnnnnnnnnnnnnnnnnnnnnnnnnnnnnnnnnnnnnnnnnnnnnnnnnnnnnnnnnnnnnnnnnnnnnnnnnnnnnnnnnnnnnnnnnnnnnnnnnnnnnnnnnnnnnnnnnnnnnnnnnnnnnnnnnnnnnnnnnnnnnnnnnnnnnnnnnnnnnnnnnnnnnnnnnnnnnnnnnnnnnnnnnnnnnnnnnnnnnnnnnnnnnnnnnnnnnnnnnnnnnnnnnnnnnnnnnnnnnnnnnnnnnnnnnnnnnnnnnnnnnnnnnnnnnnnnnnnnnnnnnnnnnnnnnnnnnnnnnnnnnnnnnnnnnnnnnnnnnnnnnnnnnnnnnnnnnnnnnnnnnnnnnnnnnnnnnnnnnnnnnnnnnnnnnnnnnnnnnnnnnnnnnnnnnnnnnnnnnnnnnnnnnnnnnnnnnnnnnnnnnnnnnnnnnnnnnnnnnnnnnnnnnnnnnnnnnnnnnnnnnnnnnnnnnnnnnnnnnnnnnnnnnnnnnnnnnnnnnnnnnnnnnnnnnnnnnnnnnnnnnnnnnnnnnnnnnnnnnnnnnnnnnnnnnnnnnnnnnnnnnnnnnnnnnnnnnnnnnnnnnnnnnnnnnnnnnnnnnnnnnnnnnnnnnnnnnnnnnnnnnnnnnnnnnnnnnnnnnnnnnnnnnnnnnnnnnnnnnnnnnnnnnnnnnnnnnnnnnnnnnnnnnnnnnnnnnnnnnnnnnnnnnnnnnnnnnnnnnnnnnnnnnnnnnnnnnnnnnnnnnnnnnnnnnnnnnnnnnnnnnnnnnnnnnnnnnnnnnnnnnnnnnnnnnnnnnnnnnnnnnnnnnnnnnnnnnnnnnnnnnnnnnnnnnnnnnnnnnnnnnnnnnnnnnnnnnnnnnnnnnnnnnnnnnnnnnnnnnnnnnnnnnnnnnnnnnnnnnnnnnnnnnnnnnnnnnnnnnnnnnnnnnnnnnnnnnnnnnnnnnnnnnnnnnnnnnnnnnnnnnnnnnnnnnnnnnnnnnnnnnnnnnnnnnnnnnnnnnnnnnnnnnnnnnnnnnnnnnnnnnnnnnnnnnnnnnnnnnnnnnnnnnnnnnnnnnnnnnnnnnnnnnnnnnnnnnnnnnnnnnnnnnnnnnnnnnnnnnnnnnnnnnnnnnnnnnnnnnnnnnnnnnnnnnnnnnnnnnnnnnnnnnnnnnnnnnnnnnnnnnnnnnnnnnnnnnnnnnnnnnnnnnnnnnnnnnnnnnnnnnnnnnnnnnnnnnnnnnnnnnnnnnnnnnnnnnnnnnnnnnnnnnnnnnnnnnnnnnnnnnnnnnnnnnnnnnnnnnnnnnnnnnnnnnnnnnnnnnnnnnnnnnnnnnnnnnnnnnnnnnnnnnnnnnnnnnnnnnnnnnnnnnnnnnnnnnnnnnnnnnnnnnnnnnnnnnnnnnnnnnnnnnnnnnnnnnnnnnnnnnnnnnnnnnnnnnnnnnnnnnnnnnnnnnnnnnnnnnnnnnnnnnnnnnnnnnnnnnnnnnnnnnnnnnnnnnnnnnnnnnnnnnnnnnnnnnnnnnnnnnnnnnnnnnnnnnnnnnnnnnnnnnnnnnnnnnnnnnnnnnnnnnnnnnnnnnnnnnnnnnnnnnnnnnnnnnnnnnnnnnnnnnnnnnnnnnnnnnnnnnnnnnnnnnnnnnnnnnnnnnnnnnnnnnnnnnnnnnnnnnnnnnnnnnnnnnnnnnnnnnnnnnnnnnnnnnnnnnnnnnnnnnnnnnnnnnnnnnnnnnnnnnnnnnnnnnnnnnnnnnnnnnnnnnnnnnnnnnnnnnnnnnnnnnnnnnnnnnnnnnnnnnnnnnnnnnnnnnnnnnnnnnnnnnnnnnnnnnnnnnnnnnnnnnnnnnnnnnnnnnnnnnnnnnnnnnnnnnnnnnnnnnnnnnnnnnnnnnnnnnnnnnnnnnnnnnnnnnnnnnnnnnnnnnnnnnnnnnnnnnnnnnnnnnnnnnnnnnnnnnnnnnnnnnnnnnnnnnnnnnnnnnnnnnnnnnnnnnnnnnnnnnnnnnnnnnnnnnnnnnnnnnnnnnnnnnnnnnnnnnnnnnnnnnnnnnnnnnnnnnnnnnnnnnnnnnnnnnnnnnnnnnnnnnnnnnnnnnnnnnnnnnnnnnnnnnnnnnnnnnnnnnnnnnnnnnnnnnnnnnnnnnnnnnnnnnnnnnnnnnnnnnnnnnnnnnnnnnnnnnnnnnnnnnnnnnnnnnnnnnnnnnnnnnnnnnnnnnnnnnnnnnnnnnnnnnnnnnnnnnnnnnnnnnnnnnnnnnnnnnnnnnnnnnnnnnnnnnnnnnnnnnnnnnnnnnnnnnnnnnnnnnnnnnnnnnnnnnnnnnnnnnnnnnnnnnnnnnnnnnnnnnnnnnnnnnnnnnnnnnnnnnnnnnnnnnnnnnnnnnnnnnnnnnnnnnnnnnnnnnnnnnnnnnnnnnnnnnnnnnnnnnnnnnnnnnnnnnnnnnnnnnnnnnnnnnnnnnnnnnnnnnnnnnnnnnnnnnnnnnnnnnnnnnnnnnnnnnnnnnnnnnnnnnnnnnnnnnnnnnnnnnnnnnnnnnnnnnnnnnnnnnnnnnnnnnnnnnnnnnnnnnnnnnnnnnnnnnnnnnnnnnnnnnnnnnnnnnnnnnnnnnnnnnnnnnnnnnnnnnnnnnnnnnnnnnnnnnnnnnnnnnnnnnnnnnnnnnnnnnnnnnnnnnnnnnnnnnnnnnnnnnnnnnnnnnnnnnnnnnnnnnnnnnnnnnnnnnnnnnnnnnnnnnnnnnnnnnnnnnnnnnnnnnnnnnnnnnnnnnnnnnnnnnnnnnnnnnnnnnnnnnnnnnnnnnnnnnnnnnnnnnnnnnnnnnnnnnnnnnnnnnnnnnnnnnnnnnnnnnnnnnnnnnnnnnnnnnnnnnnnnnnnnnnnnnnnnnnnnnnnnnnnnnnnnnnnnnnnnnnnnnnnnnnnnnnnnnnnnnnnnnnnnnnnnnnnnnnnnnnnnnnnnnnnnnnnnnnnnnnnnnnnnnnnnnnnnnnnnnnnnnnnnnnnnnnnnnnnnnnnnnnnnnnnnnnnnnnnnnnnnnnnnnnnnnnnnnnnnnnnnnnnnnnnnnnnnnnnnnnnnnnnnnnnnnnnnnnnnnnnnnnnnnnnnnnnnnnnnnnnnnnnnnnnnnnnnnnnnnnnnnnnnnnnnnnnnnnnnnnnnnnnnnnnnnnnnnnnnnnnnnnnnnnnnnnnnnnnnnnnnnnnnnnnnnnnnnnnnnnnnnnnnnnnnnnnnnnnnnnnnnnnnnnnnnnnnnnnnnnnnnnnnnnnnnnnnnnnnnnnnnnnnnnnnnnnnnnnnnnnnnnnnnnnnnnnnnnnnnnnnnnnnnnnnnnnnnnnnnnnnnnnnnnnnnnnnnnnnnnnnnnnnnnnnnnnnnnnnnnnnnnnnnnnnnnnnnnnnnnnnnnnnnnnnnnnnnnnnnnnnnnnnnnnnnnnnnnnnnnnnnnnnnnnnnnnnnnnnnnnnnnnnnnnnnnnnnnnnnnnnnnnnnnnnnnnnnnnnnnnnnnnnnnnnnnnnnnnnnnnnnnnnnnnnnnnnnnnnnnnnnnnnnnnnnnnnnnnnnnnnnnnnnnnnnnnnnnnnnnnnnnnnnnnnnnnnnnnnnnnnnnnnnnnnnnnnnnnnnnnnnnnnnnnnnnnnnnnnnnnnnnnnnnnnnnnnnnnnnnnnnnnnnnnnnnnnnnnnnnnnnnnnnnnnnnnnnnnnnnnnnnnnnnnnnnnnnnnnnnnnnnnnnnnnnnnnnnnnnnnnnnnnnnnnnnnnnnnnnnnnnnnnnnnnnnnnnnnnnnnnnnnnnnnnnnnnnnnnnnnnnnnnnnnnnnnnnnnnnnnnnnnnnnnnnnnnnnnnnnnnnnnnnnnnnnnnnnnnnnnnnnnnnnnnnnnnnnnnnnnnnnnnnnnnnnnnnnnnnnnnnnnnnnnnnnnnnnnnnnnnnnnnnnnnnnnnnnnnnnnnnnnnnnnnnnnnnnnnnnnnnnnnnnnnnnnnnnnnnnnnnnnnnnnnnnnnnnnnnnnnnnnnnnnnnnnnnnnnnnnnnnnnnnnnnnnnnnnnnnnnnnnnnnnnnnnnnnnnnnnnnnnnnnnnnnnnnnnnnnnnnnnnnnnnnnnnnnnnnnnnnnnnnnnnnnnnnnnnnnnnnnnnnnnnnnnnnnnnnnnnnnnnnnnnnnnnnnnnnnnnnnnnnnnnnnnnnnnnnnnnnnnnnnnnnnnnnnnnnnnnnnnnnnnnnnnnnnnnnnnnnnnnnnnnnnnnnnnnnnnnnnnnnnnnnnnnnnnnnnnnnnnnnnnnnnnnnnnnnnnnnnnnnnnnnnnnnnnnnnnnnnnnnnnnnnnnnnnnnnnnnnnnnnnnnnnnnnnnnnnnnnnnnnnnnnnnnnnnnnnnnnnnnnnnnnnnnnnnnnnnnnnnnnnnnnnnnnnnnnnnnnnnnnnnnnnnnnnnnnnnnnnnnnnnnnnnnnnnnnnnnnnnnnnnnnnnnnnnnnnnnnnnnnnnnnnnnnnnnnnnnnnnnnnnnnnnnnnnnnnnnnnnnnnnnnnnnnnnnnnnnnnnnnnnnnnnnnnnnnnnnnnnnnnnnnnnnnnnnnnnnnnnnnnnnnnnnnnnnnnnnnnnnnnnnnnnnnnnnnnnnnnnnnnnnnnnnnnnnnnnnnnnnnnnnnnnnnnnnnnnnnnnnnnnnnnnnnnnnnnnnnnnnnnnnnnnnnnnnnnnnnnnnnnnnnnnnnnnnnnnnnnnnnnnnnnnnnnnnnnnnnnnnnnnnnnnnnnnnnnnnnnnnnnnnnnnnnnnnnnnnnnnnnnnnnnnnnnnnnnnnnnnnnnnnnnnnnnnnnnnnnnnnnnnnnnnnnnnnnnnnnnnnnnnnnnnnnnnnnnnnnnnnnnnnnnnnnnnnnnnnnnnnnnnnnnnnnnnnnnnnnnnnnnnnnnnnnnnnnnnnnnnnnnnnnnnnnnnnnnnnnnnnnnnnnnnnnnnnnnnnnnnnnnnnnnnnnnnnnnnnnnnnnnnnnnnnnnnnnnnnnnnnnnnnnnnnnnnnnnnnnnnnnnnnnnnnnnnnnnnnnnnnnnnnnnnnnnnnnnnnnnnnnnnnnnnnnnnnnnnnnnnnnnnnnnnnnnnnnnnnnnnnnnnnnnnnnnnnnnnnnnnnnnnnnnnnnnnnnnnnnnnnnnnnnnnnnnnnnnnnnnnnnnnnnnnnnnnnnnnnnnnnnnnnnnnnnnnnnnnnnnnnnnnnnnnnnnnnnnnnnnnnnnnnnnnnnnnnnnnnnnnnnnnnnnnnnnnnnnnnnnnnnnnnnnnnnnnnnnnnnnnnnnnnnnnnnnnnnnnnnnnnnnnnnnnnnnnnnnnnnnnnnnnnnnnnnnnnnnnnnnnnnnnnnnnnnnnnnnnnnnnnnnnnnnnnnnnnnnnnnnnnnnnnnnnnnnnnnnnnnnnnnnnnnnnnnnnnnnnnnnnnnnnnnnnnnnnnnnnnnnnnnnnnnnnnnnnnnnnnnnnnnnnnnnnnnnnnnnnnnnnnnnnnnnnnnnnnnnnnnnnnnnnnnnnnnnnnnnnnnnnnnnnnnnnnnnnnnnnnnnnnnnnnnnnnnnnnnnnnnnnnnnnnnnnnnnnnnnnnnnnnnnnnnnnnnnnnnnnnnnnnnnnnnnnnnnnnnnnnnnnnnnnnnnnnnnnnnnnnnnnnnnnnnnnnnnnnnnnnnnnnnnnnnnnnnnnnnnnnnnnnnnnnnnnnnnnnnnnnnnnnnnnnnnnnnnnnnnnnnnnnnnnnnnnnnnnnnnnnnnnnnnnnnnnnnnnnnnnnnnnnnnnnnnnnnnnnnnnnnnnnnnnnnnnnnnnnnnnnnnnnnnnnnnnnnnnnnnnnnnnnnnnnnnnnnnnnnnnnnnnnnnnnnnnnnnnnnnnnnnnnnnnnnnnnnnnnnnnnnnnnnnnnnnnnnnnnnnnnnnnnnnnnnnnnnnnnnnnnnnnnnnnnnnnnnnnnnnnnnnnnnnnnnnnnnnnnnnnnnnnnnnnnnnnnnnnnnnnnnnnnnnnnnnnnnnnnnnnnnnnnnnnnnnnnnnnnnnnnnnnnnnnnnnnnnnnnnnnnnnnnnnnnnnnnnnnnnnnnnnnnnnnnnnnnnnnnnnnnnnnnnnnnnnnnnnnnnnnnnnnnnnnnnnnnnnnnnnnnnnnnnnnnnnnnnnnnnnnnnnnnnnnnnnnnnnnnnnnnnnnnnnnnnnnnnnnnnnnnnnnnnnnnnnnnnnnnnnnnnnnnnnnnnnnnnnnnnnnnnnnnnnnnnnnnnnnnnnnnnnnnnnnnnnnnnnnnnnnnnnnnnnnnnnnnnnnnnnnnnnnnnnnnnnnnnnnnnnnnnnnnnnnnnnnnnnnnnnnnnnnnnnnnnnnnnnnnnnnnnnnnnnnnnnnnnnnnnnnnnnnnnnnnnnnnnnnnnnnnnnnnnnnnnnnnnnnnnnnnnnnnnnnnnnnnnnnnnnnnnnnnnnnnnnnnnnnnnnnnnnnnnnnnnnnnnnnnnnnnnnnnnnnnnnnnnnnnnnnnnnnnnnnnnnnnnnnnnnnnnnnnnnnnnnnnnnnnnnnnnnnnnnnnnnnnnnnnnnnnnnnnnnnnnnnnnnnnnnnnnnnnnnnnnnnnnnnnnnnnnnnnnnnnnnnnnnnnnnnnnnnnnnnnnnnnnnnnnnnnnnnnnnnnnnnnnnnnnnnnnnnnnnnnnnnnnnnnnnnnnnnnnnnnnnnnnnnnnnnnnnnnnnnnnnnnnnnnnnnnnnnnnnnnnnnnnnnnnnnnnnnnnnnnnnnnnnnnnnnnnnnnnnnnnnnnnnnnnnnnnnnnnnnnnnnnnnnnnnnnnnnnnnnnnnnnnnnnnnnnnnnnnnnnnnnnnnnnnnnnnnnnnnnnnnnnnnnnnnnnnnnnnnnnnnnnnnnnnnnnnnnnnnnnnnnnnnnnnnnnnnnnnnnnnnnnnnnnnnnnnnnnnnnnnnnnnnnnnnnnnnnnnnnnnnnnnnnnnnnnnnnnnnnnnnnnnnnnnnnnnnnnnnnnnnnnnnnnnnnnnnnnnnnnnnnnnnnnnnnnnnnnnnnnnnnnnnnnnnnnnnnnnnnnnnnnnnnnnnnnnnnnnnnnnnnnnnnnnnnnnnnnnnnnnnnnnnnnnnnnnnnnnnnnnnnnnnnnnnnnnnnnnnnnnnnnnnnnnnnnnnnnnnnnnnnnnnnnnnnnnnnnnnnnnnnnnnnnnnnnnnnnnnnnnnnnnnnnnnnnnnnnnnnnnnnnnnnnnnnnnnnnnnnnnnnnnnnnnnnnnnnnnnnnnnnnnnnnnnnnnnnnnnnnnnnnnnnnnnnnnnnnnnnnnnnnnnnnnnnnnnnnnnnnnnnnnnnnnnnnnnnnnnnnnnnnnnnnnnnnnnnnnnnnnnnnnnnnnnnnnnnnnnnnnnnnnnnnnnnnnnnnnnnnnnnnnnnnnnnnnnnnnnnnnnnnnnnnnnnnnnnnnnnnnnnnnnnnnnnnnnnnnnnnnnnnnnnnnnnnnnnnnnnnnnnnnnnnnnnnnnnnnnnnnnnnnnnnnnnnnnnnnnnnnnnnnnnnnnnnnnnnnnnnnnnnnnnnnnnnnnnnnnnnnnnnnnnnnnnnnnnnnnnnnnnnnnnnnnnnnnnnnnnnnnnnnnnnnnnnnnnnnnnnnnnnnnnnnnnnnnnnnnnnnnnnnnnnnnnnnnnnnnnnnnnnnnnnnnnnnnnnnnnnnnnnnnnnnnnnnnnnnnnnnnnnnnnnnnnnnnnnnnnnnnnnnnnnnnnnnnnnnnnnnnnnnnnnnnnnnnnnnnnnnnnnnnnnnnnnnnnnnnnnnnnnnnnnnnnnnnnnnnnnnnnnnnnnnnnnnnnnnnnnnnnnnnnnnnnnnnnnnnnnnnnnnnnnnnnnnnnnnnnnnnnnnnnnnnnnnnnnnnnnnnnnnnnnnnnnnnnnnnnnnnnnnnnnnnnnnnnnnnnnnnnnnnnnnnnnnnnnnnnnnnnnnnnnnnnnnnnnnnnnnnnnnnnnnnnnnnnnnnnnnnnnnnnnnnnnnnnnnnnnnnnnnnnnnnnnnnnnnnnnnnnnnnnnnnnnnnnnnnnnnnnnnnnnnnnnnnnnnnnnnnnnnnnnnnnnnnnnnnnnnnnnnnnnnnnnnnnnnnnnnnnnnnnnnnnnnnnnnnnnnnnnnnnnnnnnnnnnnnnnnnnnnnnnnnnnnnnnnnnnnnnnnnnnnnnnnnnnnnnnnnnnnnnnnnnnnnnnnnnnnnnnnnnnnnnnnnnnnnnnnnnnnnnnnnnnnnnnnnnnnnnnnnnnnnnnnnnnnnnnnnnnnnnnnnnnnnnnnnnnnnnnnnnnnnnnnnnnnnnnnnnnnnnnnnnnnnnnnnnnnnnnnnnnnnnnnnnnnnnnnnnnnnnnnnnnnnnnnnnnnnnnnnnnnnnnnnnnnnnnnnnnnnnnnnnnnnnnnnnnnnnnnnnnnnnnnnnnnnnnnnnnnnnnnnnnnnnnnnnnnnnnnnnnnnnnnnnnnnnnnnnnnnnnnnnnnnnnnnnnnnnnnnnnnnnnnnnnnnnnnnnnnnnnnnnnnnnnnnnnnnnnnnnnnnnnnnnnnnnnnnnnnnnnnnnnnnnnnnnnnnnnnnnnnnnnnnnnnnnnnnnnnnnnnnnnnnnnnnnnnnnnnnnnnnnnnnnnnnnnnnnnnnnnnnnnnnnnnnnnnnnnnnnnnnnnnnnnnnnnnnnnnnnnnnnnnnnnnnnnnnnnnnnnnnnnnnnnnnnnnnnnnnnnnnnnnnnnnnnnnnnnnnnnnnnnnnnnnnnnnnnnnnnnnnnnnnnnnnnnnnnnnnnnnnnnnnnnnnnnnnnnnnnnnnnnnnnnnnnnnnnnnnnnnnnnnnnnnnnnnnnnnnnnnnnnnnnnnnnnnnnnnnnnnnnnnnnnnnnnnnnnnnnnnnnnnnnnnnnnnnnnnnnnnnnnnnnnnnnnnnnnnnnnnnnnnnnnnnnnnnnnnnnnnnnnnnnnnnnnnnnnnnnnnnnnnnnnnnnnnnnnnnnnnnnnnnnnnnnnnnnnnnnnnnnnnnnnnnnnnnnnnnnnnnnnnnnnnnnnnnnnnnnnnnnnnnnnnnnnnnnnnnnnnnnnnnnnnnnnnnnnnnnnnnnnnnnnnnnnnnnnnnnnnnnnnnnnnnnnnnnnnnnnnnnnnnnnnnnnnnnnnnnnnnnnnnnnnnnnnnnnnnnnnnnnnnnnnnnnnnnnnnnnnnnnnnnnnnnnnnnnnnnnnnnnnnnnnnnnnnnnnnnnnnnnnnnnnnnnnnnnnnnnnnnnnnnnnnnnnnnnnnnnnnnnnnnnnnnnnnnnnnnnnnnnnnnnnnnnnnnnnnnnnnnnnnnnnnnnnnnnnnnnnnnnnnnnnnnnnnnnnnnnnnnnnnnnnnnnnnnnnnnnnnnnnnnnnnnnnnnnnnnnnnnnnnnnnnnnnnnnnnnnnnnnnnnnnnnnnnnnnnnnnnnnnnnnnnnnnnnnnnnnnnnnnnnnnnnnnnnnnnnnnnnnnnnnnnnnnnnnnnnnnnnnnnnnnnnnnnnnnnnnnnnnnnnnnnnnnnnnnnnnnnnnnnnnnnnnnnnnnnnnnnnnnnnnnnnnnnnnnnnnnnnnnnnnnnnnnnnnnnnnnnnnnnnnnnnnnnnnnnnnnnnnnnnnnnnnnnnnnnnnnnnnnnnnnnnnnnnnnnnnnnnnnnnnnnnnnnnnnnnnnnnnnnnnnnnnnnnnnnnnnnnnnnnnnnnnnnnnnnnnnnnnnnnnnnnnnnnnnnnnnnnnnnnnnnnnnnnnnnnnnnnnnnnnnnnnnnnnnnnnnnnnnnnnnnnnnnnnnnnnnnnnnnnnnnnnnnnnnnnnnnnnnnnnnnnnnnnnnnnnnnnnnnnnnnnnnnnnnnnnnnnnnnnnnnnnnnnnnnnnnnnnnnnnnnnnnnnnnnnnnnnnnnnnnnnnnnnnnnnnnnnnnnnnnnnnnnnnnnnnnnnnnnnnnnnnnnnnnnnnnnnnnnnnnnnnnnnnnnnnnnnnnnnnnnnnnnnnnnnnnnnnnnnnnnnnnnnnnnnnnnnnnnnnnnnnnnnnnnnnnnnnnnnnnnnnnnnnnnnnnnnnnnnnnnnnnnnnnnnnnnnnnnnnnnnnnnnnnnnnnnnnnnnnnnnnnnnnnnnnnnnnnnnnnnnnnnnnnnnnnnnnnnnnnnnnnnnnnnnnnnnnnnnnnnnnnnnnnnnnnnnnnnnnnnnnnnnnnnnnnnnnnnnnnnnnnnnnnnnnnnnnnnnnnnnnnnnnnnnnnnnnnnnnnnnnnnnnnnnnnnnnnnnnnnnnnnnnnnnnnnnnnnnnnnnnnnnnnnnnnnnnnnnnnnnnnnnnnnnnnnnnnnnnnnnnnnnnnnnnnnnnnnnnnnnnnnnnnnnnnnnnnnnnnnnnnnnnnnnnnnnnnnnnnnnnnnnnnnnnnnnnnnnnnnnnnnnnnnnnnnnnnnnnnnnnnnnnnnnnnnnnnnnnnnnnnnnnnnnnnnnnnnnnnnnnnnnnnnnnnnnnnnnnnnnnnnnnnnnnnnnnnnnnnnnnnnnnnnnnnnnnnnnnnnnnnnnnnnnnnnnnnnnnnnnnnnnnnnnnnnnnnnnnnnnnnnnnnnnnnnnnnnnnnnnnnnnnnnnnnnnnnnnnnnnnnnnnnnnnnnnnnnnnnnnnnnnnnnnnnnnnnnnnnnnnnnnnnnnnnnnnnnnnnnnnnnnnnnnnnnnnnnnnnnnnnnnnnnnnnnnnnnnnnnnnnnnnnnnnnnnnnnnnnnnnnnnnnnnnnnnnnnnnnnnnnnnnnnnnnnnnnnnnnnnnnnnnnnnnnnnnnnnnnnnnnnnnnnnnnnnnnnnnnnnnnnnnnnnnnnnnnnnnnnnnnnnnnnnnnnnnnnnnnnnnnnnnnnnnnnnnnnnnnnnnnnnnnnnnnnnnnnnnnnnnnnnnnnnnnnnnnnnnnnnnnnnnnnnnnnnnnnnnnnnnnnnnnnnnnnnnnnnnnnnnnnnnnnnnnnnnnnnnnnnnnnnnnnnnnnnnnnnnnnnnnnnnnnnnnnnnnnnnnnnnnnnnnnnnnnnnnnnnnnnnnnnnnnnnnnnnnnnnnnnnnnnnnnnnnnnnnnnnnnnnnnnnnnnnnnnnnnnnnnnnnnnnnnnnnnnnnnnnnnnnnnnnnnnnnnnnnnnnnnnnnnnnnnnnnnnnnnnnnnnnnnnnnnnnnnnnnnnnnnnnnnnnnnnnnnnnnnnnnnnnnnnnnnnnnnnnnnnnnnnnnnnnnnnnnnnnnnnnnnnnnnnnnnnnnnnnnnnnnnnnnnnnnnnnnnnnnnnnnnnnnnnnnnnnnnnnnnnnnnnnnnnnnnnnnnnnnnnnnnnnnnnnnnnnnnnnnnnnnnnnnnnnnnnnnnnnnnnnnnnnnnnnnnnnnnnnnnnnnnnnnnnnnnnnnnnnnnnnnnnnnnnnnnnnnnnnnnnnnnnnnnnnnnnnnnnnnnnnnnnnnnnnnnnnnnnnnnnnnnnnnnnnnnnnnnnnnnnnnnnnnnnnnnnnnnnnnnnnnnnnnnnnnnnnnnnnnnnnnnnnnnnnnnnnnnnnnnnnnnnnnnnnnnnnnnnnnnnnnnnnnnnnnnnnnnnnnnnnnnnnnnnnnnnnnnnnnnnnnnnnnnnnnnnnnnnnnnnnnnnnnnnnnnnnnnnnnnnnnnnnnnnnnnnnnnnnnnnnnnnnnnnnnnnnnnnnnnnnnnnnnnnnnnnnnnnnnnnnnnnnnnnnnnnnnnnnnnnnnnnnnnnnnnnnnnnnnnnnnnnnnnnnnnnnnnnnnnnnnnnnnnnnnnnnnnnnnnnnnnnnnnnnnnnnnnnnnnnnnnnnnnnnnnnnnnnnnnnnnnnnnnnnnnnnnnnnnnnnnnnnnnnnnnnnnnnnnnnnnnnnnnnnnnnnnnnnnnnnnnnnnnnnnnnnnnnnnnnnnnnnnnnnnnnnnnnnnnnnnnnnnnnnnnnnnnnnnnnnnnnnnnnnnnnnnnnnnnnnnnnnnnnnnnnnnnnnnnnnnnnnnnnnnnnnnnnnnnnnnnnnnnnnnnnnnnnnnnnnnnnnnnnnnnnnnnnnnnnnnnnnnnnnnnnnnnnnnnnnnnnnnnnnnnnnnnnnnnnnnnnnnnnnnnnnnnnnnnnnnnnnnnnnnnnnnnnnnnnnnnnnnnnnnnnnnnnnnnnnnnnnnnnnnnnnnnnnnnnnnnnnnnnnnnnnnnnnnnnnnnnnnnnnnnnnnnnnnnnnnnnnnnnnnnnnnnnnnnnnnnnnnnnnnnnnnnnnnnnnnnnnnnnnnnnnnnnnnnnnnnnnnnnnnnnnnnnnnnnnnnnnnnnnnnnnnnnnnnnnnnnnnnnnnnnnnnnnnnnnnnnnnnnnnnnnnnnnnnnnnnnnnnnnnnnnnnnnnnnnnnnnnnnnnnnnnnnnnnnnnnnnnnnnnnnnnnnnnnnnnnnnnnnnnnnnnnnnnnnnnnnnnnnnnnnnnnnnnnnnnnnnnnnnnnnnnnnnnnnnnnnnnnnnnnnnnnnnnnnnnnnnnnnnnnnnnnnnnnnnnnnnnnnnnnnnnnnnnnnnnnnnnnnnnnnnnnnnnnnnnnnnnnnnnnnnnnnnnnnnnnnnnnnnnnnnnnnnnnnnnnnnnnnnnnnnnnnnnnnnnnnnnnnnnnnnnnnnnnnnnnnnnnnnnnnnnnnnnnnnnnnnnnnnnnnnnnnnnnnnnnnnnnnnnnnnnnnnnnnnnnnnnnnnnnnnnnnnnnnnnnnnnnnnnnnnnnnnnnnnnnnnnnnnnnnnnnnnnnnnnnnnnnnnnnnnnnnnnnnnnnnnnnnnnnnnnnnnnnnnnnnnnnnnnnnnnnnnnnnnnnnnnnnnnnnnnnnnnnnnnnnnnnnnnnnnnnnnnnnnnnnnnnnnnnnnnnnnnnnnnnnnnnnnnnnnnnnnnnnnnnnnnnnnnnnnnnnnnnnnnnnnnnnnnnnnnnnnnnnnnnnnnnnnnnnnnnnnnnnnnnnnnnnnnnnnnnnnnnnnnnnnnnnnnnnnnnnnnnnnnnnnnnnnnnnnnnnnnnnnnnnnnnnnnnnnnnnnnnnnnnnnnnnnnnnnnnnnnnnnnnnnnnnnnnnnnnnnnnnnnnnnnnnnnnnnnnnnnnnnnnnnnnnnnnnnnnnnnnnnnnnnnnnnnnnnnnnnnnnnnnnnnnnnnnnnnnnnnnnnnnnnnnnnnnnnnnnnnnnnnnnnnnnnnnnnnnnnnnnnnnnnnnnnnnnnnnnnnnnnnnnnnnnnnnnnnnnnnnnnnnnnnnnnnnnnnnnnnnnnnnnnnnnnnnnnnnnnnnnnnnnnnnnnnnnnnnnnnnnnnnnnnnnnnnnnnnnnnnnnnnnnnnnnnnnnnnnnnnnnnnnnnnnnnnnnnnnnnnnnnnnnnnnnnnnnnnnnnnnnnnnnnnnnnnnnnnnnnnnnnnnnnnnnnnnnnnnnnnnnnnnnnnnnnnnnnnnnnnnnnnnnnnnnnnnnnnnnnnnnnnnnnnnnnnnnnnnnnnnnnnnnnnnnnnnnnnnnnnnnnnnnnnnnnnnnnnnnnnnnnnnnnnnnnnnnnnnnnnnnnnnnnnnnnnnnnnnnnnnnnnnnnnnnnnnnnnnnnnnnnnnnnnnnnnnnnnnnnnnnnnnnnnnnnnnnnnnnnnnnnnnnnnnnnnnnnnnnnnnnnnnnnnnnnnnnnnnnnnnnnnnnnnnnnnnnnnnnnnnnnnnnnnnnnnnnnnnnnnnnnnnnnnnnnnnnnnnnnnnnnnnnnnnnnnnnnnnnnnnnnnnnnnnnnnnnnnnnnnnnnnnnnnnnnnnnnnnnnnnnnnnnnnnnnnnnnnnnnnnnnnnnnnnnnnnnnnnnnnnnnnnnnnnnnnnnnnnnnnnnnnnnnnnnnnnnnnnnnnnnnnnnnnnnnnnnnnnnnnnnnnnnnnnnnnnnnnnnnnnnnnnnnnnnnnnnnnnnnnnnnnnnnnnnnnnnnnnnnnnnnnnnnnnnnnnnnnnnnnnnnnnnnnnnnnnnnnnnnnnnnnnnnnnnnnnnnnnnnnnnnnnnnnnnnnnnnnnnnnnnnnnnnnnnnnnnnnnnnnnnnnnnnnnnnnnnnnnnnnnnnnnnnnnnnnnnnnnnnnnnnnnnnnnnnnnnnnnnnnnnnnnnnnnnnnnnnnnnnnnnnnnnnnnnnnnnnnnnnnnnnnnnnnnnnnnnnnnnnnnnnnnnnnnnnnnnnnnnnnnnnnnnnnnnnnnnnnnnnnnnnnnnnnnnnnnnnnnnnnnnnnnnnnnnnnnnnnnnnnnnnnnnnnnnnnnnnnnnnnnnnnnnnnnnnnnnnnnnnnnnnnnnnnnnnnnnnnnnnnnnnnnnnnnnnnnnnnnnnnnnnnnnnnnnnnnnnnnnnnnnnnnnnnnnnnnnnnnnnnnnnnnnnnnnnnnnnnnnnnnnnnnnnnnnnnnnnnnnnnnnnnnnnnnnnnnnnnnnnnnnnnnnnnnnnnnnnnnnnnnnnnnnnnnnnnnnnnnnnnnnnnnnnnnnnnnnnnnnnnnnnnnnnnnnnnnnnnnnnnnnnnnnnnnnnnnnnnnnnnnnnnnnnnnnnnnnnnnnnnnnnnnnnnnnnnnnnnnnnnnnnnnnnnnnnnnnnnnnnnnnnnnnnnnnnnnnnnnnnnnnnnnnnnnnnnnnnnnnnnnnnnnnnnnnnnnnnnnnnnnnnnnnnnnnnnnnnnnnnnnnnnnnnnnnnnnnnnnnnnnnnnnnnnnnnnnnnnnnnnnnnnnnnnnnnnnnnnnnnnnnnnnnnnnnnnnnnnnnnnnnnnnnnnnnnnnnnnnnnnnnnnnnnnnnnnnnnnnnnnnnnnnnnnnnnnnnnnnnnnnnnnnnnnnnnnnnnnnnnnnnnnnnnnnnnnnnnnnnnnnnnnnnnnnnnnnnnnnnnnnnnnnnnnnnnnnnnnnnnnnnnnnnnnnnnnnnnnnnnnnnnnnnnnnnnnnnnnnnnnnnnnnnnnnnnnnnnnnnnnnnnnnnnnnnnnnnnnnnnnnnnnnnnnnnnnnnnnnnnnnnnnnnnnnnnnnnnnnnnnnnnnnnnnnnnnnnnnnnnnnnnnnnnnnnnnnnnnnnnnnnnnnnnnnnnnnnnnnnnnnnnnnnnnnnnnnnnnnnnnnnnnnnnnnnnnnnnnnnnnnnnnnnnnnnnnnnnnnnnnnnnnnnnnnnnnnnnnnnnnnnnnnnnnnnnnnnnnnnnnnnnnnnnnnnnnnnnnnnnnnnnnnnnnnnnnnnnnnnnnnnnnnnnnnnnnnnnnnnnnnnnnnnnnnnnnnnnnnnnnnnnnnnnnnnnnnnnnnnnnnnnnnnnnnnnnnnnnnnnnnnnnnnnnnnnnnnnnnnnnnnnnnnnnnnnnnnnnnnnnnnnnnnnnnnnnnnnnnnnnnnnnnnnnnnnnnnnnnnnnnnnnnnnnnnnnnnnnnnnnnnnnnnnnnnnnnnnnnnnnnnnnnnnnnnnnnnnnnnnnnnnnnnnnnnnnnnnnnnnnnnnnnnnnnnnnnnnnnnnnnnnnnnnnnnnnnnnnnnnnnnnnnnnnnnnnnnnnnnnnnnnnnnnnnnnnnnnnnnnnnnnnnnnnnnnnnnnnnnnnnnnnnnnnnnnnnnnnnnnnnnnnnnnnnnnnnnnnnnnnnnnnnnnnnnnnnnnnnnnnnnnnnnnnnnnnnnnnnnnnnnnnnnnnnnnnnnnnnnnnnnnnnnnnnnnnnnnnnnnnnnnnnnnnnnnnnnnnnnnnnnnnnnnnnnnnnnnnnnnnnnnnnnnnnnnnnnnnnnnnnnnnnnnnnnnnnnnnnnnnnnnnnnnnnnnnnnnnnnnnnnnnnnnnnnnnnnnnnnnnnnnnnnnnnnnnnnnnnnnnnnnnnnnnnnnnnnnnnnnnnnnnnnnnnnnnnnnnnnnnnnnnnnnnnnnnnnnnnnnnnnnnnnnnnnnnnnnnnnnnnnnnnnnnnnnnnnnnnnnnnnnnnnnnnnnnnnnnnnnnnnnnnnnnnnnnnnnnnnnnnnnnnnnnnnnnnnnnnnnnnnnnnnnnnnnnnnnnnnnnnnnnnnnnnnnnnnnnnnnnnnnnnnnnnnnnnnnnnnnnnnnnnnnnnnnnnnnnnnnnnnnnnnnnnnnnnnnnnnnnnnnnnnnnnnnnnnnnnnnnnnnnnnnnnnnnnnnnnnnnnnnnnnnnnnnnnnnnnnnnnnnnnnnnnnnnnnnnnnnnnnnnnnnnnnnnnnnnnnnnnnnnnnnnnnnnnnnnnnnnnnnnnnnnnnnnnnnnnnnnnnnnnnnnnnnnnnnnnnnnnnnnnnnnnnnnnnnnnnnnnnnnnnnnnnnnnnnnnnnnnnnnnnnnnnnnnnnnnnnnnnnnnnnnnnnnnnnnnnnnnnnnnnnnnnnnnnnnnnnnnnnnnnnnnnnnnnnnnnnnnnnnnnnnnnnnnnnnnnnnnnnnnnnnnnnnnnnnnnnnnnnnnnnnnnnnnnnnnnnnnnnnnnnnnnnnnnnnnnnnnnnnnnnnnnnnnnnnnnnnnnnnnnnnnnnnnnnnnnnnnnnnnnnnnnnnnnnnnnnnnnnnnnnnnnnnnnnnnnnnnnnnnnnnnnnnnnnnnnnnnnnnnnnnnnnnnnnnnnnnnnnnnnnnnnnnnnnnnnnnnnnnnnnnnnnnnnnnnnnnnnnnnnnnnnnnnnnnnnnnnnnnnnnnnnnnnnnnnnnnnnnnnnnnnnnnnnnnnnnnnnnnnnnnnnnnnnnnnnnnnnnnnnnnnnnnnnnnnnnnnnnnnnnnnnnnnnnnnnnnnnnnnnnnnnnnnnnnnnnnnnnnnnnnnnnnnnnnnnnnnnnnnnnnnnnnnnnnnnnnnnnnnnnnnnnnnnnnnnnnnnnnnnnnnnnnnnnnnnnnnnnnnnnnnnnnnnnnnnnnnnnnnnnnnnnnnnnnnnnnnnnnnnnnnnnnnnnnnnnnnnnnnnnnnnnnnnnnnnnnnnnnnnnnnnnnnnnnnnnnnnnnnnnnnnnnnnnnnnnnnnnnnnnnnnnnnnnnnnnnnnnnnnnnnnnnnnnnnnnnnnnnnnnnnnnnnnnnnnnnnnnnnnnnnnnnnnnnnnnnnnnnnnnnnnnnnnnnnnnnnnnnnnnnnnnnnnnnnnnnnnnnnnnnnnnnnnnnnnnnnnnnnnnnnnnnnnnnnnnnnnnnnnnnnnnnnnnnnnnnnnnnnnnnnnnnnnnnnnnnnnnnnnnnnnnnnnnnnnnnnnnnnnnnnnnnnnnnnnnnnnnnnnnnnnnnnnnnnnnnnnnnnnnnnnnnnnnnnnnnnnnnnnnnnnnnnnnnnnnnnnnnnnnnnnnnnnnnnnnnnnnnnnnnnnnnnnnnnnnnnnnnnnnnnnnnnnnnnnnnnnnnnnnnnnnnnnnnnnnnnnnnnnnnnnnnnnnnnnnnnnnnnnnnnnnnnnnnnnnnnnnnnnnnnnnnnnnnnnnnnnnnnnnnnnnnnnnnnnnnnnnnnnnnnnnnnnnnnnnnnnnnnnnnnnnnnnnnnnnnnnnnnnnnnnnnnnnnnnnnnnnnnnnnnnnnnnnnnnnnnnnnnnnnnnnnnnnnnnnnnnnnnnnnnnnnnnnnnnnnnnnnnnnnnnnnnnnnnnnnnnnnnnnnnnnnnnnnnnnnnnnnnnnnnnnnnnnnnnnnnnnnnnnnnnnnnnnnnnnnnnnnnnnnnnnnnnnnnnnnnnnnnnnnnnnnnnnnnnnnnnnnnnnnnnnnnnnnnnnnnnnnnnnnnnnnnnnnnnnnnnnnnnnnnnnnnnnnnnnnnnnnnnnnnnnnnnnnnnnnnnnnnnnnnnnnnnnnnnnnnnnnnnnnnnnnnnnnnnnnnnnnnnnnnnnnnnnnnnnnnnnnnnnnnnnnnnnnnnnnnnnnnnnnnnnnnnnnnnnnnnnnnnnnnnnnnnnnnnnnnnnnnnnnnnnnnnnnnnnnnnnnnnnnnnnnnnnnnnnnnnnnnnnnnnnnnnnnnnnnnnnnnnnnnnnnnnnnnnnnnnnnnnnnnnnnnnnnnnnnnnnnnnnnnnnnnnnnnnnnnnnnnnnnnnnnnnnnnnnnnnnnnnnnnnnnnnnnnnnnnnnnnnnnnnnnnnnnnnnnnnnnnnnnnnnnnnnnnnnnnnnnnnnnnnnnnnnnnnnnnnnnnnnnnnnnnnnnnnnnnnnnnnnnnnnnnnnnnnnnnnnnnnnnnnnnnnnnnnnnnnnnnnnnnnnnnnnnnnnnnnnnnnnnnnnnnnnnnnnnnnnnnnnnnnnnnnnnnnnnnnnnnnnnnnnnnnnnnnnnnnnnnnnnnnnnnnnnnnnnnnnnnnnnnnnnnnnnnnnnnnnnnnnnnnnnnnnnnnnnnnnnnnnnnnnnnnnnnnnnnnnnnnnnnnnnnnnnnnnnnnnnnnnnnnnnnnnnnnnnnnnnnnnnnnnnnnnnnnnnnnnnnnnnnnnnnnnnnnnnnnnnnnnnnnnnnnnnnnnnnnnnnnnnnnnnnnnnnnnnnnnnnnnnnnnnnnnnnnnnnnnnnnnnnnnnnnnnnnnnnnnnnnnnnnnnnnnnnnnnnnnnnnnnnnnnnnnnnnnnnnnnnnnnnnnnnnnnnnnnnnnnnnnnnnnnnnnnnnnnnnnnnnnnnnnnnnnnnnnnnnnnnnnnnnnnnnnnnnnnnnnnnnnnnnnnnnnnnnnnnnnnnnnnnnnnnnnnnnnnnnnnnnnnnnnnnnnnnnnnnnnnnnnnnnnnnnnnnnnnnnnnnnnnnnnnnnnnnnnnnnnnnnnnnnnnnnnnnnnnnnnnnnnnnnnnnnnnnnnnnnnnnnnnnnnnnnnnnnnnnnnnnnnnnnnnnnnnnnnnnnnnnnnnnnnnnnnnnnnnnnnnnnnnnnnnnnnnnnnnnnnnnnnnnnnnnnnnnnnnnnnnnnnnnnnnnnnnnnnnnnnnnnnnnnnnnnnnnnnnnnnnnnnnnnnnnnnnnnnnnnnnnnnnnnnnnnnnnnnnnnnnnnnnnnnnnnnnnnnnnnnnnnnnnnnnnnnnnnnnnnnnnnnnnnnnnnnnnnnnnnnnnnnnnnnnnnnnnnnnnnnnnnnnnnnnnnnnnnnnnnnnnnnnnnnnnnnnnnnnnnnnnnnnnnnnnnnnnnnnnnnnnnnnnnnnnnnnnnnnnnnnnnnnnnnnnnnnnnnnnnnnnnnnnnnnnnnnnnnnnnnnnnnnnnnnnnnnnnnnnnnnnnnnnnnnnnnnnnnnnnnnnnnnnnnnnnnnnnnnnnnnnnnnnnnnnnnnnnnnnnnnnnnnnnnnnnnnnnnnnnnnnnnnnnnnnnnnnnnnnnnnnnnnnnnnnnnnnnnnnnnnnnnnnnnnnnnnnnnnnnnnnnnnnnnnnnnnnnnnnnnnnnnnnnnnnnnnnnnnnnnnnnnnnnnnnnnnnnnnnnnnnnnnnnnnnnnnnnnnnnnnnnnnnnnnnnnnnnnnnnnnnnnnnnnnnnnnnnnnnnnnnnnnnnnnnnnnnnnnnnnnnnnnnnnnnnnnnnnnnnnnnnnnnnnnnnnnnnnnnnnnnnnnnnnnnnnnnnnnnnnnnnnnnnnnnnnnnnnnnnnnnnnnnnnnnnnnnnnnnnnnnnnnnnnnnnnnnnnnnnnnnnnnnnnnnnnnnnnnnnnnnnnnnnnnnnnnnnnnnnnnnnnnnnnnnnnnnnnnnnnnnnnnnnnnnnnnnnnnnnnnnnnnnnnnnnnnnnnnnnnnnnnnnnnnnnnnnnnnnnnnnnnnnnnnnnnnnnnnnnnnnnnnnnnnnnnnnnnnnnnnnnnnnnnnnnnnnnnnnnnnnnnnnnnnnnnnnnnnnnnnnnnnnnnnnnnnnnnnnnnnnnnnnnnnnnnnnnnnnnnnnnnnnnnnnnnnnnnnnnnnnnnnnnnnnnnnnnnnnnnnnnnnnnnnnnnnnnnnnnnnnnnnnnnnnnnnnnnnnnnnnnnnnnnnnnnnnnnnnnnnnnnnnnnnnnnnnnnnnnnnnnnnnnnnnnnnnnnnnnnnnnnnnnnnnnnnnnnnnnnnnnnnnnnnnnnnnnnnnnnnnnnnnnnnnnnnnnnnnnnnnnnnnnnnnnnnnnnnnnnnnnnnnnnnnnnnnnnnnnnnnnnnnnnnnnnnnnnnnnnnnnnnnnnnnnnnnnnnnnnnnnnnnnnnnnnnnnnnnnnnnnnnnnnnnnnnnnnnnnnnnnnnnnnnnnnnnnnnnnnnnnnnnnnnnnnnnnnnnnnnnnnnnnnnnnnnnnnnnnnnnnnnnnnnnnnnnnnnnnnnnnnnnnnnnnnnnnnnnnnnnnnnnnnnnnnnnnnnnnnnnnnnnnnnnnnnnnnnnnnnnnnnnnnnnnnnnnnnnnnnnnnnnnnnnnnnnnnnnnnnnnnnnnnnnnnnnnnnnnnnnnnnnnnnnnnnnnnnnnnnnnnnnnnnnnnnnnnnnnnnnnnnnnnnnnnnnnnnnnnnnnnnnnnnnnnnnnnnnnnnnnnnnnnnnnnnnnnnnnnnnnnnnnnnnnnnnnnnnnnnnnnnnnnnnnnnnnnnnnnnnnnnnnnnnnnnnnnnnnnnnnnnnnnnnnnnnnnnnnnnnnnnnnnnnnnnnnnnnnnnnnnnnnnnnnnnnnnnnnnnnnnnnnnnnnnnnnnnnnnnnnnnnnnnnnnnnnnnnnnnnnnnnnnnnnnnnnnnnnnnnnnnnnnnnnnnnnnnnnnnnnnnnnnnnnnnnnnnnnnnnnnnnnnnnnnnnnnnnnnnnnnnnnnnnnnnnnnnnnnnnnnnnnnnnnnnnnnnnnnnnnnnnnnnnnnnnnnnnnnnnnnnnnnnnnnnnnnnnnnnnnnnnnnnnnnnnnnnnnnnnnnnnnnnnnnnnnnnnnnnnnnnnnnnnnnnnnnnnnnnnnnnnnnnnnnnnnnnnnnnnnnnnnnnnnnnnnnnnnnnnnnnnnnnnnnnnnnnnnnnnnnnnnnnnnnnnnnnnnnnnnnnnnnnnnnnnnnnnnnnnnnnnnnnnnnnnnnnnnnnnnnnnnnnnnnnnnnnnnnnnnnnnnnnnnnnnnnnnnnnnnnnnnnnnnnnnnnnnnnnnnnnnnnnnnnnnnnnnnnnnnnnnnnnnnnnnnnnnnnnnnnnnnnnnnnnnnnnnnnnnnnnnnnnnnnnnnnnnnnnnnnnnnnnnnnnnnnnnnnnnnnnnnnnnnnnnnnnnnnnnnnnnnnnnnnnnnnnnnnnnnnnnnnnnnnnnnnnnnnnnnnnnnnnnnnnnnnnnnnnnnnnnnnnnnnnnnnnnnnnnnnnnnnnnnnnnnnnnnnnnnnnnnnnnnnnnnnnnnnnnnnnnnnnnnnnnnnnnnnnnnnnnnnnnnnnnnnnnnnnnnnnnnnnnnnnnnnnnnnnnnnnnnnnnnnnnnnnnnnnnnnnnnnnnnnnnnnnnnnnnnnnnnnnnnnnnnnnnnnnnnnnnnnnnnnnnnnnnnnnnnnnnnnnnnnnnnnnnnnnnnnnnnnnnnnnnnnnnnnnnnnnnnnnnnnnnnnnnnnnnnnnnnnnnnnnnnnnnnnnnnnnnnnnnnnnnnnnnnnnnnnnnnnnnnnnnnnnnnnnnnnnnnnnnnnnnnnnnnnnnnnnnnnnnnnnnnnnnnnnnnnnnnnnnnnnnnnnnnnnnnnnnnnnnnnnnnnnnnnnnnnnnnnnnnnnnnnnnnnnnnnnnnnnnnnnnnnnnnnnnnnnnnnnnnnnnnnnnnnnnnnnnnnnnnnnnnnnnnnnnnnnnnnnnnnnnnnnnnnnnnnnnnnnnnnnnnnnnnnnnnnnnnnnnnnnnnnnnnnnnnnnnnnnnnnnnnnnnnnnnnnnnnnnnnnnnnnnnnnnnnnnnnnnnnnnnnnnnnnnnnnnnnnnnnnnnnnnnnnnnnnnnnnnnnnnnnnnnnnnnnnnnnnnnnnnnnnnnnnnnnnnnnnnnnnnnnnnnnnnnnnnnnnnnnnnnnnnnnnnnnnnnnnnnnnnnnnnnnnnnnnnnnnnnnnnnnnnnnnnnnnnnnnnnnnnnnnnnnnnnnnnnnnnnnnnnnnnnnnnnnnnnnnnnnnnnnnnnnnnnnnnnnnnnnnnnnnnnnnnnnnnnnnnnnnnnnnnnnnnnnnnnnnnnnnnnnnnnnnnnnnnnnnnnnnnnnnnnnnnnnnnnnnnnnnnnnnnnnnnnnnnnnnnnnnnnnnnnnnnnnnnnnnnnnnnnnnnnnnnnnnnnnnnnnnnnnnnnnnnnnnnnnnnnnnnnnnnnnnnnnnnnnnnnnnnnnnnnnnnnnnnnnnnnnnnnnnnnnnnnnnnnnnnnnnnnnnnnnnnnnnnnnnnnnnnnnnnnnnnnnnnnnnnnnnnnnnnnnnnnnnnnnnnnnnnnnnnnnnnnnnnnnnnnnnnnnnnnnnnnnnnnnnnnnnnnnnnnnnnnnnnnnnnnnnnnnnnnnnnnnnnnnnnnnnnnnnnnnnnnnnnnnnnnnnnnnnnnnnnnnnnnnnnnnnnnnnnnnnnnnnnnnnnnnnnnnnnnnnnnnnnnnnnnnnnnnnnnnnnnnnnnnnnnnnnnnnnnnnnnnnnnnnnnnnnnnnnnnnnnnnnnnnnnnnnnnnnnnnnnnnnnnnnnnnnnnnnnnnnnnnnnnnnnnnnnnnnnnnnnnnnnnnnnnnnnnnnnnnnnnnnnnnnnnnnnnnnnnnnnnnnnnnnnnnnnnnnnnnnnnnnnnnnnnnnnnnnnnnnnnnnnnnnnnnnnnnnnnnnnnnnnnnnnnnnnnnnnnnnnnnnnnnnnnnnnnnnnnnnnnnnnnnnnnnnnnnnnnnnnnnnnnnnnnnnnnnnnnnnnnnnnnnnnnnnnnnnnnnnnnnnnnnnnnnnnnnnnnnnnnnnnnnnnnnnnnnnnnnnnnnnnnnnnnnnnnnnnnnnnnnnnnnnnnnnnnnnnnnnnnnnnnnnnnnnnnnnnnnnnnnnnnnnnnnnnnnnnnnnnnnnnnnnnnnnnnnnnnnnnnnnnnnnnnnnnnnnnnnnnnnnnnnnnnnnnnnnnnnnnnnnnnnnnnnnnnnnnnnnnnnnnnnnnnnnnnnnnnnnnnnnnnnnnnnnnnnnnnnnnnnnnnnnnnnnnnnnnnnnnnnnnnnnnnnnnnnnnnnnnnnnnnnnnnnnnnnnnnnnnnnnnnnnnnnnnnnnnnnnnnnnnnnnnnnnnnnnnnnnnnnnnnnnnnnnnnnnnnnnnnnnnnnnnnnnnnnnnnnnnnnnnnnnnnnnnnnnnnnnnnnnnnnnnnnnnnnnnnnnnnnnnnnnnnnnnnnnnnnnnnnnnnnnnnnnnnnnnnnnnnnnnnnnnnnnnnnnnnnnnnnnnnnnnnnnnnnnnnnnnnnnnnnnnnnnnnnnnnnnnnnnnnnnnnnnnnnnnnnnnnnnnnnnnnnnnnnnnnnnnnnnnnnnnnnnnnnnnnnnnnnnnnnnnnnnnnnnnnnnnnnnnnnnnnnnnnnnnnnnnnnnnnnnnnnnnnnnnnnnnnnnnnnnnnnnnnnnnnnnnnnnnnnnnnnnnnnnnnnnnnnnnnnnnnnnnnnnnnnnnnnnnnnnnnnnnnnnnnnnnnnnnnnnnnnnnnnnnnnnnnnnnnnnnnnnnnnnnnnnnnnnnnnnnnnnnnnnnnnnnnnnnnnnnnnnnnnnnnnnnnnnnnnnnnnnnnnnnnnnnnnnnnnnnnnnnnnnnnnnnnnnnnnnnnnnnnnnnnnnnnnnnnnnnnnnnnnnnnnnnnnnnnnnnnnnnnnnnnnnnnnnnnnnnnnnnnnnnnnnnnnnnnnnnnnnnnnnnnnnnnnnnnnnnnnnnnnnnnnnnnnnnnnnnnnnnnnnnnnnnnnnnnnnnnnnnnnnnnnnnnnnnnnnnnnnnnnnnnnnnnnnnnnnnnnnnnnnnnnnnnnnnnnnnnnnnnnnnnnnnnnnnnnnnnnnnnnnnnnnnnnnnnnnnnnnnnnnnnnnnnnnnnnnnnnnnnnnnnnnnnnnnnnnnnnnnnnnnnnnnnnnnnnnnnnnnnnnnnnnnnnnnnnnnnnnnnnnnnnnnnnnnnnnnnnnnnnnnnnnnnnnnnnnnnnnnnnnnnnnnnnnnnnnnnnnnnnnnnnnnnnnnnnnnnnnnnnnnnnnnnnnnnnnnnnnnnnnnnnnnnnnnnnnnnnnnnnnnnnnnnnnnnnnnnnnnnnnnnnnnnnnnnnnnnnnnnnnnnnnnnnnnnnnnnnnnnnnnnnnnnnnnnnnnnnnnnnnnnnnnnnnnnnnnnnnnnnnnnnnnnnnnnnnnnnnnnnnnnnnnnnnnnnnnnnnnnnnnnnnnnnnnnnnnnnnnnnnnnnnnnnnnnnnnnnnnnnnnnnnnnnnnnnnnnnnnnnnnnnnnnnnnnnnnnnnnnnnnnnnnnnnnnnnnnnnnnnnnnnnnnnnnnnnnnnnnnnnnnnnnnnnnnnnnnnnnnnnnnnnnnnnnnnnnnnnnnnnnnnnnnnnnnnnnnnnnnnnnnnnnnnnnnnnnnnnnnnnnnnnnnnnnnnnnnnnnnnnnnnnnnnnnnnnnnnnnnnnnnnnnnnnnnnnnnnnnnnnnnnnnnnnnnnnnnnnnnnnnnnnnnnnnnnnnnnnnnnnnnnnnnnnnnnnnnnnnnnnnnnnnnnnnnnnnnnnnnnnnnnnnnnnnnnnnnnnnnnnnnnnnnnnnnnnnnnnnnnnnnnnnnnnnnnnnnnnnnnnnnnnnnnnnnnnnnnnnnnnnnnnnnnnnnnnnnnnnnnnnnnnnnnnnnnnnnnnnnnnnnnnnnnnnnnnnnnnnnnnnnnnnnnnnnnnnnnnnnnnnnnnnnnnnnnnnnnnnnnnnnnnnnnnnnnnnnnnnnnnnnnnnnnnnnnnnnnnnnnnnnnnnnnnnnnnnnnnnnnnnnnnnnnnnnnnnnnnnnnnnnnnnnnnnnnnnnnnnnnnnnnnnnnnnnnnnnnnnnnnnnnnnnnnnnnnnnnnnnnnnnnnnnnnnnnnnnnnnnnnnnnnnnnnnnnnnnnnnnnnnnnnnnnnnnnnnnnnnnnnnnnnnnnnnnnnnnnnnnnnnnnnnnnnnnnnnnnnnnnnnnnnnnnnnnnnnnnnnnnnnnnnnnnnnnnnnnnnnnnnnnnnnnnnnnnnnnnnnnnnnnnnnnnnnnnnnnnnnnnnnnnnnnnnnnnnnnnnnnnnnnnnnnnnnnnnnnnnnnnnnnnnnnnnnnnnnnnnnnnnnnnnnnnnnnnnnnnnnnnnnnnnnnnnnnnnnnnnnnnnnnnnnnnnnnnnnnnnnnnnnnnnnnnnnnnnnnnnnnnnnnnnnnnnnnnnnnnnnnnnnnnnnnnnnnnnnnnnnnnnnnnnnnnnnnnnnnnnnnnnnnnnnnnnnnnnnnnnnnnnnnnnnnnnnnnnnnnnnnnnnnnnnnnnnnnnnnnnnnnnnnnnnnnnnnnnnnnnnnnnnnnnnnnnnnnnnnnnnnnnnnnnnnnnnnnnnnnnnnnnnnnnnnnnnnnnnnnnnnnnnnnnnnnnnnnnnnnnnnnnnnnnnnnnnnnnnnnnnnnnnnnnnnnnnnnnnnnnnnnnnnnnnnnnnnnnnnnnnnnnnnnnnnnnnnnnnnnnnnnnnnnnnnnnnnnnnnnnnnnnnnnnnnnnnnnnnnnnnnnnnnnnnnnnnnnnnnnnnnnnnnnnnnnnnnnnnnnnnnnnnnnnnnnnnnnnnnnnnnnnnnnnnnnnnnnnnnnnnnnnnnnnnnnnnnnnnnnnnnnnnnnnnnnnnnnnnnnnnnnnnnnnnnnnnnnnnnnnnnnnnnnnnnnnnnnnnnnnnnnnnnnnnnnnnnnnnnnnnnnnnnnnnnnnnnnnnnnnnnnnnnnnnnnnnnnnnnnnnnnnnnnnnnnnnnnnnnnnnnnnnnnnnnnnnnnnnnnnnnnnnnnnnnnnnnnnnnnnnnnnnnnnnnnnnnnnnnnnnnnnnnnnnnnnnnnnnnnnnnnnnnnnnnnnnnnnnnnnnnnnnnnnnnnnnnnnnnnnnnnnnnnnnnnnnnnnnnnnnnnnnnnnnnnnnnnnnnnnnnnnnnnnnnnnnnnnnnnnnnnnnnnnnnnnnnnnnnnnnnnnnnnnnnnnnnnnnnnnnnnnnnnnnnnnnnnnnnnnnnnnnnnnnnnnnnnnnnnnnnnnnnnnnnnnnnnnnnnnnnnnnnnnnnnnnnnnnnnnnnnnnnnnnnnnnnnnnnnnnnnnnnnnnnnnnnnnnnnnnnnnnnnnnnnnnnnnnnnnnnnnnnnnnnnnnnnnnnnnnnnnnnnnnnnnnnnnnnnnnnnnnnnnnnnnnnnnnnnnnnnnnnnnnnnnnnnnnnnnnnnnnnnnnnnnnnnnnnnnnnnnnnnnnnnnnnnnnnnnnnnnnnnnnnnnnnnnnnnnnnnnnnnnnnnnnnnnnnnnnnnnnnnnnnnnnnnnnnnnnnnnnnnnnnnnnnnnnnnnnnnnnnnnnnnnnnnnnnnnnnnnnnnnnnnnnnnnnnnnnnnnnnnnnnnnnnnnnnnnnnnnnnnnnnnnnnnnnnnnnnnnnnnnnnnnnnnnnnnnnnnnnnnnnnnnnnnnnnnnnnnnnnnnnnnnnnnnnnnnnnnnnnnnnnnnnnnnnnnnnnnnnnnnnnnnnnnnnnnnnnnnnnnnnnnnnnnnnnnnnnnnnnnnnnnnnnnnnnnnnnnnnnnnnnnnnnnnnnnnnnnnnnnnnnnnnnnnnnnnnnnnnnnnnnnnnnnnnnnnnnnnnnnnnnnnnnnnnnnnnnnnnnnnnnnnnnnnnnnnnnnnnnnnnnnnnnnnnnnnnnnnnnnnnnnnnnnnnnnnnnnnnnnnnnnnnnnnnnnnnnnnnnnnnnnnnnnnnnnnnnnnnnnnnnnnnnnnnnnnnnnnnnnnnnnnnnnnnnnnnnnnnnnnnnnnnnnnnnnnnnnnnnnnnnnnnnnnnnnnnnnnnnnnnnnnnnnnnnnnnnnnnnnnnnnnnnnnnnnnnnnnnnnnnnnnnnnnnnnnnnnnnnnnnnnnnnnnnnnnnnnnnnnnnnnnnnnnnnnnnnnnnnnnnnnnnnnnnnnnnnnnnnnnnnnnnnnnnnnnnnnnnnnnnnnnnnnnnnnnnnnnnnnnnnnnnnnnnnnnnnnnnnnnnnnnnnnnnnnnnnnnnnnnnnnnnnnnnnnnnnnnnnnnnnnnnnnnnnnnnnnnnnnnnnnnnnnnnnnnnnnnnnnnnnnnnnnnnnnnnnnnnnnnnnnnnnnnnnnnnnnnnnnnnnnnnnnnnnnnnnnnnnnnnnnnnnnnnnnnnnnnnnnnnnnnnnnnnnnnnnnnnnnnnnnnnnnnnnnnnnnnnnnnnnnnnnnnnnnnnnnnnnnnnnnnnnnnnnnnnnnnnnnnnnnnnnnnnnnnnnnnnnnnnnnnnnnnnnnnnnnnnnnnnnnnnnnnnnnnnnnnnnnnnnnnnnnnnnnnnnnnnnnnnnnnnnnnnnnnnnnnnnnnnnnnnnnnnnnnnnnnnnnnnnnnnnnnnnnnnnnnnnnnnnnnnnnnnnnnnnnnnnnnnnnnnnnnnnnnnnnnnnnnnnnnnnnnnnnnnnnnnnnnnnnnnnnnnnnnnnnnnnnnnnnnnnnnnnnnnnnnnnnnnnnnnnnnnnnnnnnnnnnnnnnnnnnnnnnnnnnnnnnnnnnnnnnnnnnnnnnnnnnnnnnnnnnnnnnnnnnnnnnnnnnnnnnnnnnnnnnnnnnnnnnnnnnnnnnnnnnnnnnnnnnnnnnnnnnnnnnnnnnnnnnnnnnnnnnnnnnnnnnnnnnnnnnnnnnnnnnnnnnnnnnnnnnnnnnnnnnnnnnnnnnnnnnnnnnnnnnnnnnnnnnnnnnnnnnnnnnnnnnnnnnnnnnnnnnnnnnnnnnnnnnnnnnnnnnnnnnnnnnnnnnnnnnnnnnnnnnnnnnnnnnnnnnnnnnnnnnnnnnnnnnnnnnnnnnnnnnnnnnnnnnnnnnnnnnnnnnnnnnnnnnnnnnnnnnnnnnnnnnnnnnnnnnnnnnnnnnnnnnnnnnnnnnnnnnnnnnnnnnnnnnnnnnnnnnnnnnnnnnnnnnnnnnnnnnnnnnnnnnnnnnnnnnnnnnnnnnnnnnnnnnnnnnnnnnnnnnnnnnnnnnnnnnnnnnnnnnnnnnnnnnnnnnnnnnnnnnnnnnnnnnnnnnnnnnnnnnnnnnnnnnnnnnnnnnnnnnnnnnnnnnnnnnnnnnnnnnnnnnnnnnnnnnnnnnnnnnnnnnnnnnnnnnnnnnnnnnnnnnnnnnnnnnnnnnnnnnnnnnnnnnnnnnnnnnnnnnnnnnnnnnnnnnnnnnnnnnnnnnnnnnnnnnnnnnnnnnnnnnnnnnnnnnnnnnnnnnnnnnnnnnnnnnnnnnnnnnnnnnnnnnnnnnnnnnnnnnnnnnnnnnnnnnnnnnnnnnnnnnnnnnnnnnnnnnnnnnnnnnnnnnnnnnnnnnnnnnnnnnnnnnnnnnnnnnnnnnnnnnnnnnnnnnnnnnnnnnnnnnnnnnnnnnnnnnnnnnnnnnnnnnnnnnnnnnnnnnnnnnnnnnnnnnnnnnnnnnnnnnnnnnnnnnnnnnnnnnnnnnnnnnnnnnnnnnnnnnnnnnnnnnnnnnnnnnnnnnnnnnnnnnnnnnnnnnnnnnnnnnnnnnnnnnnnnnnnnnnnnnnnnnnnnnnnnnnnnnnnnnnnnnnnnnnnnnnnnnnnnnnnnnnnnnnnnnnnnnnnnnnnnnnnnnnnnnnnnnnnnnnnnnnnnnnnnnnnnnnnnnnnnnnnnnnnnnnnnnnnnnnnnnnnnnnnnnnnnnnnnnnnnnnnnnnnnnnnnnnnnnnnnnnnnnnnnnnnnnnnnnnnnnnnnnnnnnnnnnnnnnnnnnnnnnnnnnnnnnnnnnnnnnnnnnnnnnnnnnnnnnnnnnnnnnnnnnnnnnnnnnnnnnnnnnnnnnnnnnnnnnnnnnnnnnnnnnnnnnnnnnnnnnnnnnnnnnnnnnnnnnnnnnnnnnnnnnnnnnnnnnnnnnnnnnnnnnnnnnnnnnnnnnnnnnnnnnnnnnnnnnnnnnnnnnnnnnnnnnnnnnnnnnnnnnnnnnnnnnnnnnnnnnnnnnnnnnnnnnnnnnnnnnnnnnnnnnnnnnnnnnnnnnnnnnnnnnnnnnnnnnnnnnnnnnnnnnnnnnnnnnnnnnnnnnnnnnnnnnnnnnnnnnnnnnnnnnnnnnnnnnnnnnnnnnnnnnnnnnnnnnnnnnnnnnnnnnnnnnnnnnnnnnnnnnnnnnnnnnnnnnnnnnnnnnnnnnnnnnnnnnnnnnnnnnnnnnnnnnnnnnnnnnnnnnnnnnnnnnnnnnnnnnnnnnnnnnnnnnnnnnnnnnnnnnnnnnnnnnnnnnnnnnnnnnnnnnnnnnnnnnnnnnnnnnnnnnnnnnnnnnnnnnnnnnnnnnnnnnnnnnnnnnnnnnnnnnnnnnnnnnnnnnnnnnnnnnnnnnnnnnnnnnnnnnnnnnnnnnnnnnnnnnnnnnnnnnnnnnnnnnnnnnnnnnnnnnnnnnnnnnnnnnnnnnnnnnnnnnnnnnnnnnnnnnnnnnnnnnnnnnnnnnnnnnnnnnnnnnnnnnnnnnnnnnnnnnnnnnnnnnnnnnnnnnnnnnnnnnnnnnnnnnnnnnnnnnnnnnnnnnnnnnnnnnnnnnnnnnnnnnnnnnnnnnnnnnnnnnnnnnnnnnnnnnnnnnnnnnnnnnnnnnnnnnnnnnnnnnnnnnnnnnnnnnnnnnnnnnnnnnnnnnnnnnnnnnnnnnnnnnnnnnnnnnnnnnnnnnnnnnnnnnnnnnnnnnnnnnnnnnnnnnnnnnnnnnnnnnnnnnnnnnnnnnnnnnnnnnnnnnnnnnnnnnnnnnnnnnnnnnnnnnnnnnnnnnnnnnnnnnnnnnnnnnnnnnnnnnnnnnnnnnnnnnnnnnnnnnnnnnnnnnnnnnnnnnnnnnnnnnnnnnnnnnnnnnnnnnnnnnnnnnnnnnnnnnnnnnnnnnnnnnnnnnnnnnnnnnnnnnnnnnnnnnnnnnnnnnnnnnnnnnnnnnnnnnnnnnnnnnnnnnnnnnnnnnnnnnnnnnnnnnnnnnnnnnnnnnnnnnnnnnnnnnnnnnnnnnnnnnnnnnnnnnnnnnnnnnnnnnnnnnnnnnnnnnnnnnnnnnnnnnnnnnnnnnnnnnnnnnnnnnnnnnnnnnnnnnnnnnnnnnnnnnnnnnnnnnnnnnnnnnnnnnnnnnnnnnnnnnnnnnnnnnnnnnnnnnnnnnnnnnnnnnnnnnnnnnnnnnnnnnnnnnnnnnnnnnnnnnnnnnnnnnnnnnnnnnnnnnnnnnnnnnnnnnnnnnnnnnnnnnnnnnnnnnnnnnnnnnnnnnnnnnnnnnnnnnnnnnnnnnnnnnnnnnnnnnnnnnnnnnnnnnnnnnnnnnnnnnnnnnnnnnnnnnnnnnnnnnnnnnnnnnnnnnnnnnnnnnnnnnnnnnnnnnnnnnnnnnnnnnnnnnnnnnnnnnnnnnnnnnnnnnnnnnnnnnnnnnnnnnnnnnnnnnnnnnnnnnnnnnnnnnnnnnnnnnnnnnnnnnnnnnnnnnnnnnnnnnnnnnnnnnnnnnnnnnnnnnnnnnnnnnnnnnnnnnnnnnnnnnnnnnnnnnnnnnnnnnnnnnnnnnnnnnnnnnnnnnnnnnnnnnnnnnnnnnnnnnnnnnnnnnnnnnnnnnnnnnnnnnnnnnnnnnnnnnnnnnnnnnnnnnnnnnnnnnnnnnnnnnnnnnnnnnnnnnnnnnnnnnnnnnnnnnnnnnnnnnnnnnnnnnnnnnnnnnnnnnnnnnnnnnnnnnnnnnnnnnnnnnnnnnnnnnnnnnnnnnnnnnnnnnnnnnnnnnnnnnnnnnnnnnnnnnnnnnnnnnnnnnnnnnnnnnnnnnnnnnnnnnnnnnnnnnnnnnnnnnnnnnnnnnnnnnnnnnnnnnnnnnnnnnnnnnnnnnnnnnnnnnnnnnnnnnnnnnnnnnnnnnnnnnnnnnnnnnnnnnnnnnnnnnnnnnnnnnnnnnnnnnnnnnnnnnnnnnnnnnnnnnnnnnnnnnnnnnnnnnnnnnnnnnnnnnnnnnnnnnnnnnnnnnnnnnnnnnnnnnnnnnnnnnnnnnnnnnnnnnnnnnnnnnnnnnnnnnnnnnnnnnnnnnnnnnnnnnnnnnnnnnnnnnnnnnnnnnnnnnnnnnnnnnnnnnnnnnnnnnnnnnnnnnnnnnnnnnnnnnnnnnnnnnnnnnnnnnnnnnnnnnnnnnnnnnnnnnnnnnnnnnnnnnnnnnnnnnnnnnnnnnnnnnnnnnnnnnnnnnnnnnnnnnnnnnnnnnnnnnnnnnnnnnnnnnnnnnnnnnnnnnnnnnnnnnnnnnnnnnnnnnnnnnnnnnnnnnnnnnnnnnnnnnnnnnnnnnnnnnnnnnnnnnnnnnnnnnnnnnnnnnnnnnnnnnnnnnnnnnnnnnnnnnnnnnnnnnnnnnnnnnnnnnnnnnnnnnnnnnnnnnnnnnnnnnnnnnnnnnnnnnnnnnnnnnnnnnnnnnnnnnnnnnnnnnnnnnnnnnnnnnnnnnnnnnnnnnnnnnnnnnnnnnnnnnnnnnnnnnnnnnnnnnnnnnnnnnnnnnnnnnnnnnnnnnnnnnnnnnnnnnnnnnnnnnnnnnnnnnnnnnnnnnnnnnnnnnnnnnnnnnnnnnnnnnnnnnnnnnnnnnnnnnnnnnnnnnnnnnnnnnnnnnnnnnnnnnnnnnnnnnnnnnnnnnnnnnnnnnnnnnnnnnnnnnnnnnnnnnnnnnnnnnnnnnnnnnnnnnnnnnnnnnnnnnnnnnnnnnnnnnnnnnnnnnnnnnnnnnnnnnnnnnnnnnnnnnnnnnnnnnnnnnnnnnnnnnnnnnnnnnnnnnnnnnnnnnnnnnnnnnnnnnnnnnnnnnnnnnnnnnnnnnnnnnnnnnnnnnnnnnnnnnnnnnnnnnnnnnnnnnnnnnnnnnnnnnnnnnnnnnnnnnnnnnnnnnnnnnnnnnnnnnnnnnnnnnnnnnnnnnnnnnnnnnnnnnnnnnnnnnnnnnnnnnnnnnnnnnnnnnnnnnnnnnnnnnnnnnnnnnnnnnnnnnnnnnnnnnnnnnnnnnnnnnnnnnnnnnnnnnnnnnnnnnnnnnnnnnnnnnnnnnnnnnnnnnnnnnnnnnnnnnnnnnnnnnnnnnnnnnnnnnnnnnnnnnnnnnnnnnnnnnnnnnnnnnnnnnnnnnnnnnnnnnnnnnnnnnnnnnnnnnnnnnnnnnnnnnnnnnnnnnnnnnnnnnnnnnnnnnnnnnnnnnnnnnnnnnnnnnnnnnnnnnnnnnnnnnnnnnnnnnnnnnnnnnnnnnnnnnnnnnnnnnnnnnnnnnnnnnnnnnnnnnnnnnnnnnnnnnnnnnnnnnnnnnnnnnnnnnnnnnnnnnnnnnnnnnnnnnnnnnnnnnnnnnnnnnnnnnnnnnnnnnnnnnnnnnnnnnnnnnnnnnnnnnnnnnnnnnnnnnnnnnnnnnnnnnnnnnnnnnnnnnnnnnnnnnnnnnnnnnnnnnnnnnnnnnnnnnnnnnnnnnnnnnnnnnnnnnnnnnnnnnnnnnnnnnnnnnnnnnnnnnnnnnnnnnnnnnnnnnnnnnnnnnnnnnnnnnnnnnnnnnnnnnnnnnnnnnnnnnnnnnnnnnnnnnnnnnnnnnnnnnnnnnnnnnnnnnnnnnnnnnnnnnnnnnnnnnnnnnnnnnnnnnnnnnnnnnnnnnnnnnnnnnnnnnnnnnnnnnnnnnnnnnnnnnnnnnnnnnnnnnnnnnnnnnnnnnnnnnnnnnnnnnnnnnnnnnnnnnnnnnnnnnnnnnnnnnnnnnnnnnnnnnnnnnnnnnnnnnnnnnnnnnnnnnnnnnnnnnnnnnnnnnnnnnnnnnnnnnnnnnnnnnnnnnnnnnnnnnnnnnnnnnnnnnnnnnnnnnnnnnnnnnnnnnnnnnnnnnnnnnnnnnnnnnnnnnnnnnnnnnnnnnnnnnnnnnnnnnnnnnnnnnnnnnnnnnnnnnnnnnnnnnnnnnnnnnnnnnnnnnnnnnnnnnnnnnnnnnnnnnnnnnnnnnnnnnnnnnnnnnnnnnnnnnnnnnnnnnnnnnnnnnnnnnnnnnnnnnnnnnnnnnnnnnnnnnnnnnnnnnnnnnnnnnnnnnnnnnnnnnnnnnnnnnnnnnnnnnnnnnnnnnnnnnnnnnnnnnnnnnnnnnnnnnnnnnnnnnnnnnnnnnnnnnnnnnnnnnnnnnnnnnnnnnnnnnnnnnnnnnnnnnnnnnnnnnnnnnnnnnnnnnnnnnnnnnnnnnnnnnnnnnnnnnnnnnnnnnnnnnnnnnnnnnnnnnnnnnnnnnnnnnnnnnnnnnnnnnnnnnnnnnnnnnnnnnnnnnnnnnnnnnnnnnnnnnnnnnnnnnnnnnnnnnnnnnnnnnnnnnnnnnnnnnnnnnnnnnnnnnnnnnnnnnnnnnnnnnnnnnnnnnnnnnnnnnnnnnnnnnnnnnnnnnnnnnnnnnnnnnnnnnnnnnnnnnnnnnnnnnnnnnnnnnnnnnnnnnnnnnnnnnnnnnnnnnnnnnnnnnnnnnnnnnnnnnnnnnnnnnnnnnnnnnnnnnnnnnnnnnnnnnnnnnnnnnnnnnnnnnnnnnnnnnnnnnnnnnnnnnnnnnnnnnnnnnnnnnnnnnnnnnnnnnnnnnnnnnnnnnnnnnnnnnnnnnnnnnnnnnnnnnnnnnnnnnnnnnnnnnnnnnnnnnnnnnnnnnnnnnnnnnnnnnnnnnnnnnnnnnnnnnnnnnnnnnnnnnnnnnnnnnnnnnnnnnnnnnnnnnnnnnnnnnnnnnnnnnnnnnnnnnnnnnnnnnnnnnnnnnnnnnnnnnnnnnnnnnnnnnnnnnnnnnnnnnnnnnnnnnnnnnnnnnnnnnnnnnnnnnnnnnnnnnnnnnnnnnnnnnnnnnnnnnnnnnnnnnnnnnnnnnnnnnnnnnnnnnnnnnnnnnnnnnnnnnnnnnnnnnnnnnnnnnnnnnnnnnnnnnnnnnnnnnnnnnnnnnnnnnnnnnnnnnnnnnnnnnnnnnnnnnnnnnnnnnnnnnnnnnnnnnnnnnnnnnnnnnnnnnnnnnnnnnnnnnnnnnnnnnnnnnnnnnnnnnnnnnnnnnnnnnnnnnnnnnnnnnnnnnnnnnnnnnnnnnnnnnnnnnnnnnnnnnnnnnnnnnnnnnnnnnnnnnnnnnnnnnnnnnnnnnnnnnnnnnnnnnnnnnnnnnnnnnnnnnnnnnnnnnnnnnnnnnnnnnnnnnnnnnnnnnnnnnnnnnnnnnnnnnnnnnnnnnnnnnnnnnnnnnnnnnnnnnnnnnnnnnnnnnnnnnnnnnnnnnnnnnnnnnnnnnnnnnnnnnnnnnnnnnnnnnnnnnnnnnnnnnnnnnnnnnnnnnnnnnnnnnnnnnnnnnnnnnnnnnnnnnnnnnnnnnnnnnnnnnnnnnnnnnnnnnnnnnnnnnnnnnnnnnnnnnnnnnnnnnnnnnnnnnnnnnnnnnnnnnnnnnnnnnnnnnnnnnnnnnnnnnnnnnnnnnnnnnnnnnnnnnnnnnnnnnnnnnnnnnnnnnnnnnnnnnnnnnnnnnnnnnnnnnnnnnnnnnnnnnnnnnnnnnnnnnnnnnnnnnnnnnnnnnnnnnnnnnnnnnnnnnnnnnnnnnnnnnnnnnnnnnnnnnnnnnnnnnnnnnnnnnnnnnnnnnnnnnnnnnnnnnnnnnnnnnnnnnnnnnnnnnnnnnnnnnnnnnnnnnnnnnnnnnnnnnnnnnnnnnnnnnnnnnnnnnnnnnnnnnnnnnnnnnnnnnnnnnnnnnnnnnnnnnnnnnnnnnnnnnnnnnnnnnnnnnnnnnnnnnnnnnnnnnnnnnnnnnnnnnnnnnnnnnnnnnnnnnnnnnnnnnnnnnnnnnnnnnnnnnnnnnnnnnnnnnnnnnnnnnnnnnnnnnnnnnnnnnnnnnnnnnnnnnnnnnnnnnnnnnnnnnnnnnnnnnnnnnnnnnnnnnnnnnnnnnnnnnnnnnnnnnnnnnnnnnnnnnnnnnnnnnnnnnnnnnnnnnnnnnnnnnnnnnnnnnnnnnnnnnnnnnnnnnnnnnnnnnnnnnnnnnnnnnnnnnnnnnnnnnnnnnnnnnnnnnnnnnnnnnnnnnnnnnnnnnnnnnnnnnnnnnnnnnnnnnnnnnnnnnnnnnnnnnnnnnnnnnnnnnnnnnnnnnnnnnnnnnnnnnnnnnnnnnnnnnnnnnnnnnnnnnnnnnnnnnnnnnnnnnnnnnnnnnnnnnnnnnnnnnnnnnnnnnnnnnnnnnnnnnnnnnnnnnnnnnnnnnnnnnnnnnnnnnnnnnnnnnnnnnnnnnnnnnnnnnnnnnnnnnnnnnnnnnnnnnnnnnnnnnnnnnnnnnnnnnnnnnnnnnnnnnnnnnnnnnnnnnnnnnnnnnnnnnnnnnnnnnnnnnnnnnnnnnnnnnnnnnnnnnnnnnnnnnnnnnnnnnnnnnnnnnnnnnnnnnnnnnnnnnnnnnnnnnnnnnnnnnnnnnnnnnnnnnnnnnnnnnnnnnnnnnnnnnnnnnnnnnnnnnnnnnnnnnnnnnnnnnnnnnnnnnnnnnnnnnnnnnnnnnnnnnnnnnnnnnnnnnnnnnnnnnnnnnnnnnnnnnnnnnnnnnnnnnnnnnnnnnnnnnnnnnnnnnnnnnnnnnnnnnnnnnnnnnnnnnnnnnnnnnnnnnnnnnnnnnnnnnnnnnnnnnnnnnnnnnnnnnnnnnnnnnnnnnnnnnnnnnnnnnnnnnnnnnnnnnnnnnnnnnnnnnnnnnnnnnnnnnnnnnnnnnnnnnnnnnnnnnnnnnnnnnnnnnnnnnnnnnnnnnnnnnnnnnnnnnnnnnnnnnnnnnnnnnnnnnnnnnnnnnnnnnnnnnnnnnnnnnnnnnnnnnnnnnnnnnnnnnnnnnnnnnnnnnnnnnnnnnnnnnnnnnnnnnnnnnnnnnnnnnnnnnnnnnnnnnnnnnnnnnnnnnnnnnnnnnnnnnnnnnnnnnnnnnnnnnnnnnnnnnnnnnnnnnnnnnnnnnnnnnnnnnnnnnnnnnnnnnnnnnnnnnnnnnnnnnnnnnnnnnnnnnnnnnnnnnnnnnnnnnnnnnnnnnnnnnnnnnnnnnnnnnnnnnnnnnnnnnnnnnnnnnnnnnnnnnnnnnnnnnnnnnnnnnnnnnnnnnnnnnnnnnnnnnnnnnnnnnnnnnnnnnnnnnnnnnnnnnnnnnnnnnnnnnnnnnnnnnnnnnnnnnnnnnnnnnnnnnnnnnnnnnnnnnnnnnnnnnnnnnnnnnnnnnnnnnnnnnnnnnnnnnnnnnnnnnnnnnnnnnnnnnnnnnnnnnnnnnnnnnnnnnnnnnnnnnnnnnnnnnnnnnnnnnnnnnnnnnnnnnnnnnnnnnnnnnnnnnnnnnnnnnnnnnnnnnnnnnnnnnnnnnnnnnnnnnnnnnnnnnnnnnnnnnnnnnnnnnnnnnnnnnnnnnnnnnnnnnnnnnnnnnnnnnnnnnnnnnnnnnnnnnnnnnnnnnnnnnnnnnnnnnnnnnnnnnnnnnnnnnnnnnnnnnnnnnnnnnnnnnnnnnnnnnnnnnnnnnnnnnnnnnnnnnnnnnnnnnnnnnnnnnnnnnnnnnnnnnnnnnnnnnnnnnnnnnnnnnnnnnnnnnnnnnnnnnnnnnnnnnnnnnnnnnnnnnnnnnnnnnnnnnnnnnnnnnnnnnnnnnnnnnnnnnnnnnnnnnnnnnnnnnnnnnnnnnnnnnnnnnnnnnnnnnnnnnnnnnnnnnnnnnnnnnnnnnnnnnnnnnnnnnnnnnnnnnnnnnnnnnnnnnnnnnnnnnnnnnnnnnnnnnnnnnnnnnnnnnnnnnnnnnnnnnnnnnnnnnnnnnnnnnnnnnnnnnnnnnnnnnnnnnnnnnnnnnnnnnnnnnnnnnnnnnnnnnnnnnnnnnnnnnnnnnnnnnnnnnnnnnnnnnnnnnnnnnnnnnnnnnnnnnnnnnnnnnnnnnnnnnnnnnnnnnnnnnnnnnnnnnnnnnnnnnnnnnnnnnnnnnnnnnnnnnnnnnnnnnnnnnnnnnnnnnnnnnnnnnnnnnnnnnnnnnnnnnnnnnnnnnnnnnnnnnnnnnnnnnnnnnnnnnnnnnnnnnnnnnnnnnnnnnnnnnnnnnnnnnnnnnnnnnnnnnnnnnnnnnnnnnnnnnnnnnnnnnnnnnnnnnnnnnnnnnnnnnnnnnnnnnnnnnnnnnnnnnnnnnnnnnnnnnnnnnnnnnnnnnnnnnnnnnnnnnnnnnnnnnnnnnnnnnnnnnnnnnnnnnnnnnnnnnnnnnnnnnnnnnnnnnnnnnnnnnnnnnnnnnnnnnnnnnnnnnnnnnnnnnnnnnnnnnnnnnnnnnnnnnnnnnnnnnnnnnnnnnnnnnnnnnnnnnnnnnnnnnnnnnnnnnnnnnnnnnnnnnnnnnnnnnnnnnnnnnnnnnnnnnnnnnnnnnnnnnnnnnnnnnnnnnnnnnnnnnnnnnnnnnnnnnnnnnnnnnnnnnnnnnnnnnnnnnnnnnnnnnnnnnnnnnnnnnnnnnnnnnnnnnnnnnnnnnnnnnnnnnnnnnnnnnnnnnnnnnnnnnnnnnnnnnnnnnnnnnnnnnnnnnnnnnnnnnnnnnnnnnnnnnnnnnnnnnnnnnnnnnnnnnnnnnnnnnnnnnnnnnnnnnnnnnnnnnnnnnnnnnnnnnnnnnnnnnnnnnnnnnnnnnnnnnnnnnnnnnnnnnnnnnnnnnnnnnnnnnnnnnnnnnnnnnnnnnnnnnnnnnnnnnnnnnnnnnnnnnnnnnnnnnnnnnnnnnnnnnnnnnnnnnnnnnnnnnnnnnnnnnnnnnnnnnnnnnnnnnnnnnnnnnnnnnnnnnnnnnnnnnnnnnnnnnnnnnnnnnnnnnnnnnnnnnnnnnnnnnnnnnnnnnnnnnnnnnnnnnnnnnnnnnnnnnnnnnnnnnnnnnnnnnnnnnnnnnnnnnnnnnnnnnnnnnnnnnnnnnnnnnnnnnnnnnnnnnnnnnnnnnnnnnnnnnnnnnnnnnnnnnnnnnnnnnnnnnnnnnnnnnnnnnnnnnnnnnnnnnnnnnnnnnnnnnnnnnnnnnnnnnnnnnnnnnnnnnnnnnnnnnnnnnnnnnnnnnnnnnnnnnnnnnnnnnnnnnnnnnnnnnnnnnnnnnnnnnnnnnnnnnnnnnnnnnnnnnnnnnnnnnnnnnnnnnnnnnnnnnnnnnnnnnnnnnnnnnnnnnnnnnnnnnnnnnnnnnnnnnnnnnnnnnnnnnnnnnnnnnnnnnnnnnnnnnnnnnnnnnnnnnnnnnnnnnnnnnnnnnnnnnnnnnnnnnnnnnnnnnnnnnnnnnnnnnnnnnnnnnnnnnnnnnnnnnnnnnnnnnnnnnnnnnnnnnnnnnnnnnnnnnnnnnnnnnnnnnnnnnnnnnnnnnnnnnnnnnnnnnnnnnnnnnnnnnnnnnnnnnnnnnnnnnnnnnnnnnnnnnnnnnnnnnnnnnnnnnnnnnnnnnnnnnnnnnnnnnnnnnnnnnnnnnnnnnnnnnnnnnnnnnnnnnnnnnnnnnnnnnnnnnnnnnnnnnnnnnnnnnnnnnnnnnnnnnnnnnnnnnnnnnnnnnnnnnnnnnnnnnnnnnnnnnnnnnnnnnnnnnnnnnnnnnnnnnnnnnnnnnnnnnnnnnnnnnnnnnnnnnnnnnnnnnnnnnnnnnnnnnnnnnnnnnnnnnnnnnnnnnnnnnnnnnnnnnnnnnnnnnnnnnnnnnnnnnnnnnnnnnnnnnnnnnnnnnnnnnnnnnnnnnnnnnnnnnnnnnnnnnnnnnnnnnnnnnnnnnnnnnnnnnnnnnnnnnnnnnnnnnnnnnnnnnnnnnnnnnnnnnnnnnnnnnnnnnnnnnnnnnnnnnnnnnnnnnnnnnnnnnnnnnnnnnnnnnnnnnnnnnnnnnnnnnnnnnnnnnnnnnnnnnnnnnnnnnnnnnnnnnnnnnnnnnnnnnnnnnnnnnnnnnnnnnnnnnnnnnnnnnnnnnnnnnnnnnnnnnnnnnnnnnnnnnnnnnnnnnnnnnnnnnnnnnnnnnnnnnnnnnnnnnnnnnnnnnnnnnnnnnnnnnnnnnnnnnnnnnnnnnnnnnnnnnnnnnnnnnnnnnnnnnnnnnnnnnnnnnnnnnnnnnnnnnnnnnnnnnnnnnnnnnnnnnnnnnnnnnnnnnnnnnnnnnnnnnnnnnnnnnnnnnnnnnnnnnnnnnnnnnnnnnnnnnnnnnnnnnnnnnnnnnnnnnnnnnnnnnnnnnnnnnnnnnnnnnnnnnnnnnnnnnnnnnnnnnnnnnnnnnnnnnnnnnnnnnnnnnnnnnnnnnnnnnnnnnnnnnnnnnnnnnnnnnnnnnnnnnnnnnnnnnnnnnnnnnnnnnnnnnnnnnnnnnnnnnnnnnnnnnnnnnnnnnnnnnnnnnnnnnnnnnnnnnnnnnnnnnnnnnnnnnnnnnnnnnnnnnnnnnnnnnnnnnnnnnnnnnnnnnnnnnnnnnnnnnnnnnnnnnnnnnnnnnnnnnnnnnnnnnnnnnnnnnnnnnnnnnnnnnnnnnnnnnnnnnnnnnnnnnnnnnnnnnnnnnnnnnnnnnnnnnnnnnnnnnnnnnnnnnnnnnnnnnnnnnnnnnnnnnnnnnnnnnnnnnnnnnnnnnnnnnnnnnnnnnnnnnnnnnnnnnnnnnnnnnnnnnnnnnnnnnnnnnnnnnnnnnnnnnnnnnnnnnnnnnnnnnnnnnnnnnnnnnnnnnnnnnnnnnnnnnnnnnnnnnnnnnnnnnnnnnnnnnnnnnnnnnnnnnnnnnnnnnnnnnnnnnnnnnnnnnnnnnnnnnnnnnnnnnnnnnnnnnnnnnnnnnnnnnnnnnnnnnnnnnnnnnnnnnnnnnnnnnnnnnnnnnnnnnnnnnnnnnnnnnnnnnnnnnnnnnnnnnnnnnnnnnnnnnnnnnnnnnnnnnnnnnnnnnnnnnnnnnnnnnnnnnnnnnnnnnnnnnnnnnnnnnnnnnnnnnnnnnnnnnnnnnnnnnnnnnnnnnnnnnnnnnnnnnnnnnnnnnnnnnnnnnnnnnnnnnnnnnnnnnnnnnnnnnnnnnnnnnnnnnnnnnnnnnnnnnnnnnnnnnnnnnnnnnnnnnnnnnnnnnnnnnnnnnnnnnnnnnnnnnnnnnnnnnnnnnnnnnnnnnnnnnnnnnnnnnnnnnnnnnnnnnnnnnnnnnnnnnnnnnnnnnnnnnnnnnnnnnnnnnnnnnnnnnnnnnnnnnnnnnnnnnnnnnnnnnnnnnnnnnnnnnnnnnnnnnnnnnnnnnnnnnnnnnnnnnnnnnnnnnnnnnnnnnnnnnnnnnnnnnnnnnnnnnnnnnnnnnnnnnnnnnnnnnnnnnnnnnnnnnnnnnnnnnnnnnnnnnnnnnnnnnnnnnnnnnnnnnnnnnnnnnnnnnnnnnnnnnnnnnnnnnnnnnnnnnnnnnnnnnnnnnnnnnnnnnnnnnnnnnnnnnnnnnnnnnnnnnnnnnnnnnnnnnnnnnnnnnnnnnnnnnnnnnnnnnnnnnnnnnnnnnnnnnnnnnnnnnnnnnnnnnnnnnnnnnnnnnnnnnnnnnnnnnnnnnnnnnnnnnnnnnnnnnnnnnnnnnnnnnnnnnnnnnnnnnnnnnnnnnnnnnnnnnnnnnnnnnnnnnnnnnnnnnnnnnnnnnnnnnnnnnnnnnnnnnnnnnnnnnnnnnnnnnnnnnnnnnnnnnnnnnnnnnnnnnnnnnnnnnnnnnnnnnnnnnnnnnnnnnnnnnnnnnnnnnnnnnnnnnnnnnnnnnnnnnnnnnnnnnnnnnnnnnnnnnnnnnnnnnnnnnnnnnnnnnnnnnnnnnnnnnnnnnnnnnnnnnnnnnnnnnnnnnnnnnnnnnnnnnnnnnnnnnnnnnnnnnnnnnnnnnnnnnnnnnnnnnnnnnnnnnnnnnnnnnnnnnnnnnnnnnnnnnnnnnnnnnnnnnnnnnnnnnnnnnnnnnnnnnnnnnnnnnnnnnnnnnnnnnnnnnnnnnnnnnnnnnnnnnnnnnnnnnnnnnnnnnnnnnnnnnnnnnnnnnnnnnnnnnnnnnnnnnnnnnnnnnnnnnnnnnnnnnnnnnnnnnnnnnnnnnnnnnnnnnnnnnnnnnnnnnnnnnnnnnnnnnnnnnnnnnnnnnnnnnnnnnnnnnnnnnnnnnnnnnnnnnnnnnnnnnnnnnnnnnnnnnnnnnnnnnnnnnnnnnnnnnnnnnnnnnnnnnnnnnnnnnnnnnnnnnnnnnnnnnnnnnnnnnnnnnnnnnnnnnnnnnnnnnnnnnnnnnnnnnnnnnnnnnnnnnnnnnnnnnnnnnnnnnnnnnnnnnnnnnnnnnnnnnnnnnnnnnnnnnnnnnnnnnnnnnnnnnnnnnnnnnnnnnnnnnnnnnnnnnnnnnnnnnnnnnnnnnnnnnnnnnnnnnnnnnnnnnnnnnnnnnnnnnnnnnnnnnnnnnnnnnnnnnnnnnnnnnnnnnnnnnnnnnnnnnnnnnnnnnnnnnnnnnnnnnnnnnnnnnnnnnnnnnnnnnnnnnnnnnnnnnnnnnnnnnnnnnnnnnnnnnnnnnnnnnnnnnnnnnnnnnnnnnnnnnnnnnnnnnnnnnnnnnnnnnnnnnnnnnnnnnnnnnnnnnnnnnnnnnnnnnnnnnnnnnnnnnnnnnnnnnnnnnnnnnnnnnnnnnnnnnnnnnnnnnnnnnnnnnnnnnnnnnnnnnnnnnnnnnnnnnnnnnnnnnnnnnnnnnnnnnnnnnnnnnnnnnnnnnnnnnnnnnnnnnnnnnnnnnnnnnnnnnnnnnnnnnnnnnnnnnnnnnnnnnnnnnnnnnnnnnnnnnnnnnnnnnnnnnnnnnnnnnnnnnnnnnnnnnnnnnnnnnnnnnnnnnnnnnnnnnnnnnnnnnnnnnnnnnnnnnnnnnnnnnnnnnnnnnnnnnnnnnnnnnnnnnnnnnnnnnnnnnnnnnnnnnnnnnnnnnnnnnnnnnnnnnnnnnnnnnnnnnnnnnnnnnnnnnnnnnnnnnnnnnnnnnnnnnnnnnnnnnnnnnnnnnnnnnnnnnnnnnnnnnnnnnnnnnnnnnnnnnnnnnnnnnnnnnnnnnnnnnnnnnnnnnnnnnnnnnnnnnnnnnnnnnnnnnnnnnnnnnnnnnnnnnnnnnnnnnnnnnnnnnnnnnnnnnnnnnnnnnnnnnnnnnnnnnnnnnnnnnnnnnnnnnnnnnnnnnnnnnnnnnnnnnnnnnnnnnnnnnnnnnnnnnnnnnnnnnnnnnnnnnnnnnnnnnnnnnnnnnnnnnnnnnnnnnnnnnnnnnnnnnnnnnnnnnnnnnnnnnnnnnnnnnnnnnnnnnnnnnnnnnnnnnnnnnnnnnnnnnnnnnnnnnnnnnnnnnnnnnnnnnnnnnnnnnnnnnnnnnnnnnnnnnnnnnnnnnnnnnnnnnnnnnnnnnnnnnnnnnnnnnnnnnnnnnnnnnnnnnnnnnnnnnnnnnnnnnnnnnnnnnnnnnnnnnnnnnnnnnnnnnnnnnnnnnnnnnnnnnnnnnnnnnnnnnnnnnnnnnnnnnnnnnnnnnnnnnnnnnnnnnnnnnnnnnnnnnnnnnnnnnnnnnnnnnnnnnnnnnnnnnnnnnnnnnnnnnnnnnnnnnnnnnnnnnnnnnnnnnnnnnnnnnnnnnnnnnnnnnnnnnnnnnnnnnnnnnnnnnnnnnnnnnnnnnnnnnnnnnnnnnnnnnnnnnnnnnnnnnnnnnnnnnnnnnnnnnnnnnnnnnnnnnnnnnnnnnnnnnnnnnnnnnnnnnnnnnnnnnnnnnnnnnnnnnnnnnnnnnnnnnnnnnnnnnnnnnnnnnnnnnnnnnnnnnnnnnnnnnnnnnnnnnnnnnnnnnnnnnnnnnnnnnnnnnnnnnnnnnnnnnnnnnnnnnnnnnnnnnnnnnnnnnnnnnnnnnnnnnnnnnnnnnnnnnnnnnnnnnnnnnnnnnnnnnnnnnnnnnnnnnnnnnnnnnnnnnnnnnnnnnnnnnnnnnnnnnnnnnnnnnnnnnnnnnnnnnnnnnnnnnnnnnnnnnnnnnnnnnnnnnnnnnnnnnnnnnnnnnnnnnnnnnnnnnnnnnnnnnnnnnnnnnnnnnnnnnnnnnnnnnnnnnnnnnnnnnnnnnnnnnnnnnnnnnnnnnnnnnnnnnnnnnnnnnnnnnnnnnnnnnnnnnnnnnnnnnnnnnnnnnnnnnnnnnnnnnnnnnnnnnnnnnnnnnnnnnnnnnnnnnnnnnnnnnnnnnnnnnnnnnnnnnnnnnnnnnnnnnnnnnnnnnnnnnnnnnnnnnnnnnnnnnnnnnnnnnnnnnnnnnnnnnnnnnnnnnnnnnnnnnnnnnnnnnnnnnnnnnnnnnnnnnnnnnnnnnnnnnnnnnnnnnnnnnnnnnnnnnnnnnnnnnnnnnnnnnnnnnnnnnnnnnnnnnnnnnnnnnnnnnnnnnnnnnnnnnnnnnnnnnnnnnnnnnnnnnnnnnnnnnnnnnnnnnnnnnnnnnnnnnnnnnnnnnnnnnnnnnnnnnnnnnnnnnnnnnnnnnnnnnnnnnnnnnnnnnnnnnnnnnnnnnnnnnnnnnnnnnnnnnnnnnnnnnnnnnnnnnnnnnnnnnnnnnnnnnnnnnnnnnnnnnnnnnnnnnnnnnnnnnnnnnnnnnnnnnnnnnnnnnnnnnnnnnnnnnnnnnnnnnnnnnnnnnnnnnnnnnnnnnnnnnnnnnnnnnnnnnnnnnnnnnnnnnnnnnnnnnnnnnnnnnnnnnnnnnnnnnnnnnnnnnnnnnnnnnnnnnnnnnnnnnnnnnnnnnnnnnnnnnnnnnnnnnnnnnnnnnnnnnnnnnnnnnnnnnnnnnnnnnnnnnnnnnnnnnnnnnnnnnnnnnnnnnnnnnnnnnnnnnnnnnnnnnnnnnnnnnnnnnnnnnnnnnnnnnnnnnnnnnnnnnnnnnnnnnnnnnnnnnnnnnnnnnnnnnnnnnnnnnnnnnnnnnnnnnnnnnnnnnnnnnnnnnnnnnnnnnnnnnnnnnnnnnnnnnnnnnnnnnnnnnnnnnnnnnnnnnnnnnnnnnnnnnnnnnnnnnnnnnnnnnnnnnnnnnnnnnnnnnnnnnnnnnnnnnnnnnnnnnnnnnnnnnnnnnnnnnnnnnnnnnnnnnnnnnnnnnnnnnnnnnnnnnnnnnnnnnnnnnnnnnnnnnnnnnnnnnnnnnnnnnnnnnnnnnnnnnnnnnnnnnnnnnnnnnnnnnnnnnnnnnnnnnnnnnnnnnnnnnnnnnnnnnnnnnnnnnnnnnnnnnnnnnnnnnnnnnnnnnnnnnnnnnnnnnnnnnnnnnnnnnnnnnnnnnnnnnnnnnnnnnnnnnnnnnnnnnnnnnnnnnnnnnnnnnnnnnnnnnnnnnnnnnnnnnnnnnnnnnnnnnnnnnnnnnnnnnnnnnnnnnnnnnnnnnnnnnnnnnnnnnnnnnnnnnnnnnnnnnnnnnnnnnnnnnnnnnnnnnnnnnnnnnnnnnnnnnnnnnnnnnnnnnnnnnnnnnnnnnnnnnnnnnnnnnnnnnnnnnnnnnnnnnnnnnnnnnnnnnnnnnnnnnnnnnnnnnnnnnnnnnnnnnnnnnnnnnnnnnnnnnnnnnnnnnnnnnnnnnnnnnnnnnnnnnnnnnnnnnnnnnnnnnnnnnnnnnnnnnnnnnnnnnnnnnnnnnnnnnnnnnnnnnnnnnnnnnnnnnnnnnnnnnnnnnnnnnnnnnnnnnnnnnnnnnnnnnnnnnnnnnnnnnnnnnnnnnnnnnnnnnnnnnnnnnnnnnnnnnnnnnnnnnnnnnnnnnnnnnnnnnnnnnnnnnnnnnnnnnnnnnnnnnnnnnnnnnnnnnnnnnnnnnnnnnnnnnnnnnnnnnnnnnnnnnnnnnnnnnnnnnnnnnnnnnnnnnnnnnnnnnnnnnnnnnnnnnnnnnnnnnnnnnnnnnnnnnnnnnnnnnnnnnnnnnnnnnnnnnnnnnnnnnnnnnnnnnnnnnnnnnnnnnnnnnnnnnnnnnnnnnnnnnnnnnnnnnnnnnnnnnnnnnnnnnnnnnnnnnnnnnnnnnnnnnnnnnnnnnnnnnnnnnnnnnnnnnnnnnnnnnnnnnnnnnnnnnnnnnnnnnnnnnnnnnnnnnnnnnnnnnnnnnnnnnnnnnnnnnnnnnnnnnnnnnnnnnnnnnnnnnnnnnnnnnnnnnnnnnnnnnnnnnnnnnnnnnnnnnnnnnnnnnnnnnnnnnnnnnnnnnnnnnnnnnnnnnnnnnnnnnnnnnnnnnnnnnnnnnnnnnnnnnnnnnnnnnnnnnnnnnnnnnnnnnnnnnnnnnnnnnnnnnnnnnnnnnnnnnnnnnnnnnnnnnnnnnnnnnnnnnnnnnnnnnnnnnnnnnnnnnnnnnnnnnnnnnnnnnnnnnnnnnnnnnnnnnnnnnnnnnnnnnnnnnnnnnnnnnnnnnnnnnnnnnnnnnnnnnnnnnnnnnnnnnnnnnnnnnnnnnnnnnnnnnnnnnnnnnnnnnnnnnnnnnnnnnnnnnnnnnnnnnnnnnnnnnnnnnnnnnnnnnnnnnnnnnnnnnnnnnnnnnnnnnnnnnnnnnnnnnnnnnnnnnnnnnnnnnnnnnnnnnnnnnnnnnnnnnnnnnnnnnnnnnnnnnnnnnnnnnnnnnnnnnnnnnnnnnnnnnnnnnnnnnnnnnnnnnnnnnnnnnnnnnnnnnnnnnnnnnnnnnnnnnnnnnnnnnnnnnnnnnnnnnnnnnnnnnnnnnnnnnnnnnnnnnnnnnnnnnnnnnnnnnnnnnnnnnnnnnnnnnnnnnnnnnnnnnnnnnnnnnnnnnnnnnnnnnnnnnnnnnnnnnnnnnnnnnnnnnnnnnnnnnnnnnnnnnnnnnnnnnnnnnnnnnnnnnnnnnnnnnnnnnnnnnnnnnnnnnnnnnnnnnnnnnnnnnnnnnnnnnnnnnnnnnnnnnnnnnnnnnnnnnnnnnnnnnnnnnnnnnnnnnnnnnnnnnnnnnnnnnnnnnnnnnnnnnnnnnnnnnnnnnnnnnnnnnnnnnnnnnnnnnnnnnnnnnnnnnnnnnnnnnnnnnnnnnnnnnnnnnnnnnnnnnnnnnnnnnnnnnnnnnnnnnnnnnnnnnnnnnnnnnnnnnnnnnnnnnnnnnnnnnnnnnnnnnnnnnnnnnnnnnnnnnnnnnnnnnnnnnnnnnnnnnnnnnnnnnnnnnnnnnnnnnnnnnnnnnnnnnnnnnnnnnnnnnnnnnnnnnnnnnnnnnnnnnnnnnnnnnnnnnnnnnnnnnnnnnnnnnnnnnnnnnnnnnnnnnnnnnnnnnnnnnnnnnnnnnnnnnnnnnnnnnnnnnnnnnnnnnnnnnnnnnnnnnnnnnnnnnnnnnnnnnnnnnnnnnnnnnnnnnnnnnnnnnnnnnnnnnnnnnnnnnnnnnnnnnnnnnnnnnnnnnnnnnnnnnnnnnnnnnnnnnnnnnnnnnnnnnnnnnnnnnnnnnnnnnnnnnnnnnnnnnnnnnnnnnnnnnnnnnnnnnnnnnnnnnnnnnnnnnnnnnnnnnnnnnnnnnnnnnnnnnnnnnnnnnnnnnnnnnnnnnnnnnnnnnnnnnnnnnnnnnnnnnnnnnnnnnnnnnnnnnnnnnnnnnnnnnnnnnnnnnnnnnnnnnnnnnnnnnnnnnnnnnnnnnnnnnnnnnnnnnnnnnnnnnnnnnnnnnnnnnnnnnnnnnnnnnnnnnnnnnnnnnnnnnnnnnnnnnnnnnnnnnnnnnnnnnnnnnnnnnnnnnnnnnnnnnnnnnnnnnnnnnnnnnnnnnnnnnnnnnnnnnnnnnnnnnnnnnnnnnnnnnnnnnnnnnnnnnnnnnnnnnnnnnnnnnnnnnnnnnnnnnnnnnnnnnnnnnnnnnnnnnnnnnnnnnnnnnnnnnnnnnnnnnnnnnnnnnnnnnnnnnnnnnnnnnnnnnnnnnnnnnnnnnnnnnnnnnnnnnnnnnnnnnnnnnnnnnnnnnnnnnnnnnnnnnnnnnnnnnnnnnnnnnnnnnnnnnnnnnnnnnnnnnnnnnnnnnnnnnnnnnnnnnnnnnnnnnnnnnnnnnnnnnnnnnnnnnnnnnnnnnnnnnnnnnnnnnnnnnnnnnnnnnnnnnnnnnnnnnnnnnnnnnnnnnnnnnnnnnnnnnnnnnnnnnnnnnnnnnnnnnnnnnnnnnnnnnnnnnnnnnnnnnnnnnnnnnnnnnnnnnnnnnnnnnnnnnnnnnnnnnnnnnnnnnnnnnnnnnnnnnnnnnnnnnnnnnnnnnnnnnnnnnnnnnnnnnnnnnnnnnnnnnnnnnnnnnnnnnnnnnnnnnnnnnnnnnnnnnnnnnnnnnnnnnnnnnnnnnnnnnnnnnnnnnnnnnnnnnnnnnnnnnnnnnnnnnnnnnnnnnnnnnnnnnnnnnnnnnnnnnnnnnnnnnnnnnnnnnnnnnnnnnnnnnnnnnnnnnnnnnnnnnnnnnnnnnnnnnnnnnnnnnnnnnnnnnnnnnnnnnnnnnnnnnnnnnnnnnnnnnnnnnnnnnnnnnnnnnnnnnnnnnnnnnnnnnnnnnnnnnnnnnnnnnnnnnnnnnnnnnnnnnnnnnnnnnnnnnnnnnnnnnnnnnnnnnnnnnnnnnnnnnnnnnnnnnnnnnnnnnnnnnnnnnnnnnnnnnnnnnnnnnnnnnnnnnnnnnnnnnnnnnnnnnnnnnnnnnnnnnnnnnnnnnnnnnnnnnnnnnnnnnnnnnnnnnnnnnnnnnnnnnnnnnnnnnnnnnnnnnnnnnnnnnnnnnnnnnnnnnnnnnnnnnnnnnnnnnnnnnnnnnnnnnnnnnnnnnnnnnnnnnnnnnnnnnnnnnnnnnnnnnnnnnnnnnnnnnnnnnnnnnnnnnnnnnnnnnnnnnnnnnnnnnnnnnnnnnnnnnnnnnnnnnnnnnnnnnnnnnnnnnnnnnnnnnnnnnnnnnnnnnnnnnnnnnnnnnnnnnnnnnnnnnnnnnnnnnnnnnnnnnnnnnnnnnnnnnnnnnnnnnnnnnnnnnnnnnnnnnnnnnnnnnnnnnnnnnnnnnnnnnnnnnnnnnnnnnnnnnnnnnnnnnnnnnnnnnnnnnnnnnnnnnnnnnnnnnnnnnnnnnnnnnnnnnnnnnnnnnnnnnnnnnnnnnnnnnnnnnnnnnnnnnnnnnnnnnnnnnnnnnnnnnnnnnnnnnnnnnnnnnnnnnnnnnnnnnnnnnnnnnnnnnnnnnnnnnnnnnnnnnnnnnnnnnnnnnnnnnnnnnnnnnnnnnnnnnnnnnnnnnnnnnnnnnnnnnnnnnnnnnnnnnnnnnnnnnnnnnnnnnnnnnnnnnnnnnnnnnnnnnnnnnnnnnnnnnnnnnnnnnnnnnnnnnnnnnnnnnnnnnnnnnnnnnnnnnnnnnnnnnnnnnnnnnnnnnnnnnnnnnnnnnnnnnnnnnnnnnnnnnnnnnnnnnnnnnnnnnnnnnnnnnnnnnnnnnnnnnnnnnnnnnnnnnnnnnnnnnnnnnnnnnnnnnnnnnnnnnnnnnnnnnnnnnnnnnnnnnnnnnnnnnnnnnnnnnnnnnnnnnnnnnnnnnnnnnnnnnnnnnnnnnnnnnnnnnnnnnnnnnnnnnnnnnnnnnnnnnnnnnnnnnnnnnnnnnnnnnnnnnnnnnnnnnnnnnnnnnnnnnnnnnnnnnnnnnnnnnnnnnnnnnnnnnnnnnnnnnnnnnnnnnnnnnnnnnnnnnnnnnnnnnnnnnnnnnnnnnnnnnnnnnnnnnnnnnnnnnnnnnnnnnnnnnnnnnnnnnnnnnnnnnnnnnnnnnnnnnnnnnnnnnnnnnnnnnnnnnnnnnnnnnnnnnnnnnnnnnnnnnnnnnnnnnnnnnnnnnnnnnnnnnnnnnnnnnnnnnnnnnnnnnnnnnnnnnnnnnnnnnnnnnnnnnnnnnnnnnnnnnnnnnnnnnnnnnnnnnnnnnnnnnnnnnnnnnnnnnnnnnnnnnnnnnnnnnnnnnnnnnnnnnnnnnnnnnnnnnnnnnnnnnnnnnnnnnnnnnnnnnnnnnnnnnnnnnnnnnnnnnnnnnnnnnnnnnnnnnnnnnnnnnnnnnnnnnnnnnnnnnnnnnnnnnnnnnnnnnnnnnnnnnnnnnnnnnnnnnnnnnnnnnnnnnnnnnnnnnnnnnnnnnnnnnnnnnnnnnnnnnnnnnnnnnnnnnnnnnnnnnnnnnnnnnnnnnnnnnnnnnnnnnnnnnnnnnnnnnnnnnnnnnnnnnnnnnnnnnnnnnnnnnnnnnnnnnnnnnnnnnnnnnnnnnnnnnnnnnnnnnnnnnnnnnnnnnnnnnnnnnnnnnnnnnnnnnnnnnnnnnnnnnnnnnnnnnnnnnnnnnnnnnnnnnnnnnnnnnnnnnnnnnnnnnnnnnnnnnnnnnnnnnnnnnnnnnnnnnnnnnnnnnnnnnnnnnnnnnnnnnnnnnnnnnnnnnnnnnnnnnnnnnnnnnnnnnnnnnnnnnnnnnnnnnnnnnnnnnnnnnnnnnnnnnnnnnnnnnnnnnnnnnnnnnnnnnnnnnnnnnnnnnnnnnnnnnnnnnnnnnnnnnnnnnnnnnnnnnnnnnnnnnnnnnnnnnnnnnnnnnnnnnnnnnnnnnnnnnnnnnnnnnnnnnnnnnnnnnnnnnnnnnnnnnnnnnnnnnnnnnnnnnnnnnnnnnnnnnnnnnnnnnnnnnnnnnnnnnnnnnnnnnnnnnnnnnnnnnnnnnnnnnnnnnnnnnnnnnnnnnnnnnnnnnnnnnnnnnnnnnnnnnnnnnnnnnnnnnnnnnnnnnnnnnnnnnnnnnnnnnnnnnnnnnnnnnnnnnnnnnnnnnnnnnnnnnnnnnnnnnnnnnnnnnnnnnnnnnnnnnnnnnnnnnnnnnnnnnnnnnnnnnnnnnnnnnnnnnnnnnnnnnnnnnnnnnnnnnnnnnnnnnnnnnnnnnnnnnnnnnnnnnnnnnnnnnnnnnnnnnnnnnnnnnnnnnnnnnnnnnnnnnnnnnnnnnnnnnnnnnnnnnnnnnnnnnnnnnnnnnnnnnnnnnnnnnnnnnnnnnnnnnnnnnnnnnnnnnnnnnnnnnnnnnnnnnnnnnnnnnnnnnnnnnnnnnnnnnnnnnnnnnnnnnnnnnnnnnnnnnnnnnnnnnnnnnnnnnnnnnnnnnnnnnnnnnnnnnnnnnnnnnnnnnnnnnnnnnnnnnnnnnnnnnnnnnnnnnnnnnnnnnnnnnnnnnnnnnnnnnnnnnnnnnnnnnnnnnnnnnnnnnnnnnnnnnnnnnnnnnnnnnnnnnnnnnnnnnnnnnnnnnnnnnnnnnnnnnnnnnnnnnnnnnnnnnnnnnnnnnnnnnnnnnnnnnnnnnnnnnnnnnnnnnnnnnnnnnnnnnnnnnnnnnnnnnnnnnnnnnnnnnnnnnnnnnnnnnnnnnnnnnnnnnnnnnnnnnnnnnnnnnnnnnnnnnnnnnnnnnnnnnnnnnnnnnnnnnnnnnnnnnnnnnnnnnnnnnnnnnnnnnnnnnnnnnnnnnnnnnnnnnnnnnnnnnnnnnnnnnnnnnnnnnnnnnnnnnnnnnnnnnnnnnnnnnnnnnnnnnnnnnnnnnnnnnnnnnnnnnnnnnnnnnnnnnnnnnnnnnnnnnnnnnnnnnnnnnnnnnnnnnnnnnnnnnnnnnnnnnnnnnnnnnnnnnnnnnnnnnnnnnnnnnnnnnnnnnnnnnnnnnnnnnnnnnnnnnnnnnnnnnnnnnnnnnnnnnnnnnnnnnnnnnnnnnnnnnnnnnnnnnnnnnnnnnnnnnnnnnnnnnnnnnnnnnnnnnnnnnnnnnnnnnnnnnnnnnnnnnnnnnnnnnnnnnnnnnnnnnnnnnnnnnnnnnnnnnnnnnnnnnnnnnnnnnnnnnnnnnnnnnnnnnnnnnnnnnnnnnnnnnnnnnnnnnnnnnnnnnnnnnnnnnnnnnnnnnnnnnnnnnnnnnnnnnnnnnnnnnnnnnnnnnnnnnnnnnnnnnnnnnnnnnnnnnnnnnnnnnnnnnnnnnnnnnnnnnnnnnnnnnnnnnnnnnnnnnnnnnnnnnnnnnnnnnnnnnnnnnnnnnnnnnnnnnnnnnnnnnnnnnnnnnnnnnnnnnnnnnnnnnnnnnnnnnnnnnnnnnnnnnnnnnnnnnnnnnnnnnnnnnnnnnnnnnnnnnnnnnnnnnnnnnnnnnnnnnnnnnnnnnnnnnnnnnnnnnnnnnnnnnnnnnnnnnnnnnnnnnnnnnnnnnnnnnnnnnnnnnnnnnnnnnnnnnnnnnnnnnnnnnnnnnnnnnnnnnnnnnnnnnnnnnnnnnnnnnnnnnnnnnnnnnnnnnnnnnnnnnnnnnnnnnnnnnnnnnnnnnnnnnnnnnnnnnnnnnnnnnnnnnnnnnnnnnnnnnnnnnnnnnnnnnnnnnnnnnnnnnnnnnnnnnnnnnnnnnnnnnnnnnnnnnnnnnnnnnnnnnnnnnnnnnnnnnnnnnnnnnnnnnnnnnnnnnnnnnnnnnnnnnnnnnnnnnnnnnnnnnnnnnnnnnnnnnnnnnnnnnnnnnnnnnnnnnnnnnnnnnnnnnnnnnnnnnnnnnnnnnnnnnnnnnnnnnnnnnnnnnnnnnnnnnnnnnnnnnnnnnnnnnnnnnnnnnnnnnnnnnnnnnnnnnnnnnnnnnnnnnnnnnnnnnnnnnnnnnnnnnnnnnnnnnnnnnnnnnnnnnnnnnnnnnnnnnnnnnnnnnnnnnnnnnnnnnnnnnnnnnnnnnnnnnnnnnnnnnnnnnnnnnnnnnnnnnnnnnnnnnnnnnnnnnnnnnnnnnnnnnnnnnnnnnnnnnnnnnnnnnnnnnnnnnnnnnnnnnnnnnnnnnnnnnnnnnnnnnnnnnnnnnnnnnnnnnnnnnnnnnnnnnnnnnnnnnnnnnnnnnnnnnnnnnnnnnnnnnnnnnnnnnnnnnnnnnnnnnnnnnnnnnnnnnnnnnnnnnnnnnnnnnnnnnnnnnnnnnnnnnnnnnnnnnnnnnnnnnnnnnnnnnnnnnnnnnnnnnnnnnnnnnnnnnnnnnnnnnnnnnnnnnnnnnnnnnnnnnnnnnnnnnnnnnnnnnnnnnnnnnnnnnnnnnnnnnnnnnnnnnnnnnnnnnnnnnnnnnnnnnnnnnnnnnnnnnnnnnnnnnnnnnnnnnnnnnnnnnnnnnnnnnnnnnnnnnnnnnnnnnnnnnnnnnnnnnnnnnnnnnnnnnnnnnnnnnnnnnnnnnnnnnnnnnnnnnnnnnnnnnnnnnnnnnnnnnnnnnnnnnnnnnnnnnnnnnnnnnnnnnnnnnnnnnnnnnnnnnnnnnnnnnnnnnnnnnnnnnnnnnnnnnnnnnnnnnnnnnnnnnnnnnnnnnnnnnnnnnnnnnnnnnnnnnnnnnnnnnnnnnnnnnnnnnnnnnnnnnnnnnnnnnnnnnnnnnnnnnnnnnnnnnnnnnnnnnnnnnnnnnnnnnnnnnnnnnnnnnnnnnnnnnnnnnnnnnnnnnnnnnnnnnnnnnnnnnnnnnnnnnnnnnnnnnnnnnnnnnnnnnnnnnnnnnnnnnnnnnnnnnnnnnnnnnnnnnnnnnnnnnnnnnnnnnnnnnnnnnnnnnnnnnnnnnnnnnnnnnnnnnnnnnnnnnnnnnnnnnnnnnnnnnnnnnnnnnnnnnnnnnnnnnnnnnnnnnnnnnnnnnnnnnnnnnnnnnnnnnnnnnnnnnnnnnnnnnnnnnnnnnnnnnnnnnnnnnnnnnnnnnnnnnnnnnnnnnnnnnnnnnnnnnnnnnnnnnnnnnnnnnnnnnnnnnnnnnnnnnnnnnnnnnnnnnnnnnnnnnnnnnnnnnnnnnnnnnnnnnnnnnnnnnnnnnnnnnnnnnnnnnnnnnnnnnnnnnnnnnnnnnnnnnnnnnnnnnnnnnnnnnnnnnnnnnnnnnnnnnnnnnnnnnnnnnnnnnnnnnnnnnnnnnnnnnnnnnnnnnnnnnnnnnnnnnnnnnnnnnnnnnnnnnnnnnnnnnnnnnnnnnnnnnnnnnnnnnnnnnnnnnnnnnnnnnnnnnnnnnnnnnnnnnnnnnnnnnnnnnnnnnnnnnnnnnnnnnnnnnnnnnnnnnnnnnnnnnnnnnnnnnnnnnnnnnnnnnnnnnnnnnnnnnnnnnnnnnnnnnnnnnnnnnnnnnnnnnnnnnnnnnnnnnnnnnnnnnnnnnnnnnnnnnnnnnnnnnnnnnnnnnnnnnnnnnnnnnnnnnnnnnnnnnnnnnnnnnnnnnnnnnnnnnnnnnnnnnnnnnnnnnnnnnnnnnnnnnnnnnnnnnnnnnnnnnnnnnnnnnnnnnnnnnnnnnnnnnnnnnnnnnnnnnnnnnnnnnnnnnnnnnnnnnnnnnnnnnnnnnnnnnnnnnnnnnnnnnnnnnnnnnnnnnnnnnnnnnnnnnnnnnnnnnnnnnnnnnnnnnnnnnnnnnnnnnnnnnnnnnnnnnnnnnnnnnnnnnnnnnnnnnnnnnnnnnnnnnnnnnnnnnnnnnnnnnnnnnnnnnnnnnnnnnnnnnnnnnnnnnnnnnnnnnnnnnnnnnnnnnnnnnnnnnnnnnnnnnnnnnnnnnnnnnnnnnnnnnnnnnnnnnnnnnnnnnnnnnnnnnnnnnnnnnnnnnnnnnnnnnnnnnnnnnnnnnnnnnnnnnnnnnnnnnnnnnnnnnnnnnnnnnnnnnnnnnnnnnnnnnnnnnnnnnnnnnnnnnnnnnnnnnnnnnnnnnnnnnnnnnnnnnnnnnnnnnnnnnnnnnnnnnnnnnnnnnnnnnnnnnnnnnnnnnnnnnnnnnnnnnnnnnnnnnnnnnnnnnnnnnnnnnnnnnnnnnnnnnnnnnnnnnnnnnnnnnnnnnnnnnnnnnnnnnnnnnnnnnnnnnnnnnnnnnnnnnnnnnnnnnnnnnnnnnnnnnnnnnnnnnnnnnnnnnnnnnnnnnnnnnnnnnnnnnnnnnnnnnnnnnnnnnnnnnnnnnnnnnnnnnnnnnnnnnnnnnnnnnnnnnnnnnnnnnnnnnnnnnnnnnnnnnnnnnnnnnnnnnnnnnnnnnnnnnnnnnnnnnnnnnnnnnnnnnnnnnnnnnnnnnnnnnnnnnnnnnnnnnnnnnnnnnnnnnnnnnnnnnnnnnnnnnnnnnnnnnnnnnnnnnnnnnnnnnnnnnnnnnnnnnnnnnnnnnnnnnnnnnnnnnnnnnnnnnnnnnnnnnnnnnnnnnnnnnnnnnnnnnnnnnnnnnnnnnnnnnnnnnnnnnnnnnnnnnnnnnnnnnnnnnnnnnnnnnnnnnnnnnnnnnnnnnnnnnnnnnnnnnnnnnnnnnnnnnnnnnnnnnnnnnnnnnnnnnnnnnnnnnnnnnnnnnnnnnnnnnnnnnnnnnnnnnnnnnnnnnnnnnnnnnnnnnnnnnnnnnnnnnnnnnnnnnnnnnnnnnnnnnnnnnnnnnnnnnnnnnnnnnnnnnnnnnnnnnnnnnnnnnnnnnnnnnnnnnnnnnnnnnnnnnnnnnnnnnnnnnnnnnnnnnnnnnnnnnnnnnnnnnnnnnnnnnnnnnnnnnnnnnnnnnnnnnnnnnnnnnnnnnnnnnnnnnnnnnnnnnnnnnnnnnnnnnnnnnnnnnnnnnnnnnnnnnnnnnnnnnnnnnnnnnnnnnnnnnnnnnnnnnnnnnnnnnnnnnnnnnnnnnnnnnnnnnnnnnnnnnnnnnnnnnnnnnnnnnnnnnnnnnnnnnnnnnnnnnnnnnnnnnnnnnnnnnnnnnnnnnnnnnnnnnnnnnnnnnnnnnnnnnnnnnnnnnnnnnnnnnnnnnnnnnnnnnnnnnnnnnnnnnnnnnnnnnnnnnnnnnnnnnnnnnnnnnnnnnnnnnnnnnnnnnnnnnnnnnnnnnnnnnnnnnnnnnnnnnnnnnnnnnnnnnnnnnnnnnnnnnnnnnnnnnnnnnnnnnnnnnnnnnnnnnnnnnnnnnnnnnnnnnnnnnnnnnnnnnnnnnnnnnnnnnnnnnnnnnnnnnnnnnnnnnnnnnnnnnnnnnnnnnnnnnnnnnnnnnnnnnnnnnnnnnnnnnnnnnnnnnnnnnnnnnnnnnnnnnnnnnnnnnnnnnnnnnnnnnnnnnnnnnnnnnnnnnnnnnnnnnnnnnnnnnnnnnnnnnnnnnnnnnnnnnnnnnnnnnnnnnnnnnnnnnnnnnnnnnnnnnnnnnnnnnnnnnnnnnnnnnnnnnnnnnnnnnnnnnnnnnnnnnnnnnnnnnnnnnnnnnnnnnnnnnnnnnnnnnnnnnnnnnnnnnnnnnnnnnnnnnnnnnnnnnnnnnnnnnnnnnnnnnnnnnnnnnnnnnnnnnnnnnnnnnnnnnnnnnnnnnnnnnnnnnnnnnnnnnnnnnnnnnnnnnnnnnnnnnnnnnnnnnnnnnnnnnnnnnnnnnnnnnnnnnnnnnnnnnnnnnnnnnnnnnnnnnnnnnnnnnnnnnnnnnnnnnnnnnnnnnnnnnnnnnnnnnnnnnnnnnnnnnnnnnnnnnnnnnnnnnnnnnnnnnnnnnnnnnnnnnnnnnnnnnnnnnnnnnnnnnnnnnnnnnnnnnnnnnnnnnnnnnnnnnnnnnnnnnnnnnnnnnnnnnnnnnnnnnnnnnnnnnnnnnnnnnnnnnnnnnnnnnnnnnnnnnnnnnnnnnnnnnnnnnnnnnnnnnnnnnnnnnnnnnnnnnnnnnnnnnnnnnnnnnnnnnnnnnnnnnnnnnnnnnnnnnnnnnnnnnnnnnnnnnnnnnnnnnnnnnnnnnnnnnnnnnnnnnnnnnnnnnnnnnnnnnnnnnnnnnnnnnnnnnnnnnnnnnnnnnnnnnnnnnnnnnnnnnnnnnnnnnnnnnnnnnnnnnnnnnnnnnnnnnnnnnnnnnnnnnnnnnnnnnnnnnnnnnnnnnnnnnnnnnnnnnnnnnnnnnnnnnnnnnnnnnnnnnnnnnnnnnnnnnnnnnnnnnnnnnnnnnnnnnnnnnnnnnnnnnnnnnnnnnnnnnnnnnnnnnnnnnnnnnnnnnnnnnnnnnnnnnnnnnnnnnnnnnnnnnnnnnnnnnnnnnnnnnnnnnnnnnnnnnnnnnnnnnnnnnnnnnnnnnnnnnnnnnnnnnnnnnnnnnnnnnnnnnnnnnnnnnnnnnnnnnnnnnnnnnnnnnnnnnnnnnnnnnnnnnnnnnnnnnnnnnnnnnnnnnnnnnnnnnnnnnnnnnnnnnnnnnnnnnnnnnnnnnnnnnnnnnnnnnnnnnnnnnnnnnnnnnnnnnnnnnnnnnnnnnnnnnnnnnnnnnnnnnnnnnnnnnnnnnnnnnnnnnnnnnnnnnnnnnnnnnnnnnnnnnnnnnnnnnnnnnnnnnnnnnnnnnnnnnnnnnnnnnnnnnnnnnnnnnnnnnnnnnnnnnnnnnnnnnnnnnnnnnnnnnnnnnnnnnnnnnnnnnnnnnnnnnnnnnnnnnnnnnnnnnnnnnnnnnnnnnnnnnnnnnnnnnnnnnnnnnnnnnnnnnnnnnnnnnnnnnnnnnnnnnnnnnnnnnnnnnnnnnnnnnnnnnnnnnnnnnnnnnnnnnnnnnnnnnnnnnnnnnnnnnnnnnnnnnnnnnnnnnnnnnnnnnnnnnnnnnnnnnnnnnnnnnnnnnnnnnnnnnnnnnnnnnnnnnnnnnnnnnnnnnnnnnnnnnnnnnnnnnnnnnnnnnnnnnnnnnnnnnnnnnnnnnnnnnnnnnnnnnnnnnnnnnnnnnnnnnnnnnnnnnnnnnnnnnnnnnnnnnnnnnnnnnnnnnnnnnnnnnnnnnnnnnnnnnnnnnnnnnnnnnnnnnnnnnnnnnnnnnnnnnnnnnnnnnnnnnnnnnnnnnnnnnnnnnnnnnnnnnnnnnnnnnnnnnnnnnnnnnnnnnnnnnnnnnnnnnnnnnnnnnnnnnnnnnnnnnnnnnnnnnnnnnnnnnnnnnnnnnnnnnnnnnnnnnnnnnnnnnnnnnnnnnnnnnnnnnnnnnnnnnnnnnnnnnnnnnnnnnnnnnnnnnnnnnnnnnnnnnnnnnnnnnnnnnnnnnnnnnnnnnnnnnnnnnnnnnnnnnnnnnnnnnnnnnnnnnnnnnnnnnnnnnnnnnnnnnnnnnnnnnnnnnnnnnnnnnnnnnnnnnnnnnnnnnnnnnnnnnnnnnnnnnnnnnnnnnnnnnnnnnnnnnnnnnnnnnnnnnnnnnnnnnnnnnnnnnnnnnnnnnnnnnnnnnnnnnnnnnnnnnnnnnnnnnnnnnnnnnnnnnnnnnnnnnnnnnnnnnnnnnnnnnnnnnnnnnnnnnnnnnnnnnnnnnnnnnnnnnnnnnnnnnnnnnnnnnnnnnnnnnnnnnnnnnnnnnnnnnnnnnnnnnnnnnnnnnnnnnnnnnnnnnnnnnnnnnnnnnnnnnnnnnnnnnnnnnnnnnnnnnnnnnnnnnnnnnnnnnnnnnnnnnnnnnnnnnnnnnnnnnnnnnnnnnnnnnnnnnnnnnnnnnnnnnnnnnnnnnnnnnnnnnnnnnnnnnnnnnnnnnnnnnnnnnnnnnnnnnnnnnnnnnnnnnnnnnnnnnnnnnnnnnnnnnnnnnnnnnnnnnnnnnnnnnnnnnnnnnnnnnnnnnnnnnnnnnnnnnnnnnnnnnnnnnnnnnnnnnnnnnnnnnnnnnnnnnnnnnnnnnnnnnnnnnnnnnnnnnnnnnnnnnnnnnnnnnnnnnnnnnnnnnnnnnnnnnnnnnnnnnnnnnnnnnnnnnnnnnnnnnnnnnnnnnnnnnnnnnnnnnnnnnnnnnnnnnnnnnnnnnnnnnnnnnnnnnnnnnnnnnnnnnnnnnnnnnnnnnnnnnnnnnnnnnnnnnnnnnnnnnnnnnnnnnnnnnnnnnnnnnnnnnnnnnnnnnnnnnnnnnnnnnnnnnnnnnnnnnnnnnnnnnnnnnnnnnnnnnnnnnnnnnnnnnnnnnnnnnnnnnnnnnnnnnnnnnnnnnnnnnnnnnnnnnnnnnnnnnnnnnnnnnnnnnnnnnnnnnnnnnnnnnnnnnnnnnnnnnnnnnnnnnnnnnnnnnnnnnnnnnnnnnnnnnnnnnnnnnnnnnnnnnnnnnnnnnnnnnnnnnnnnnnnnnnnnnnnnnnnnnnnnnnnnnnnnnnnnnnnnnnnnnnnnnnnnnnnnnnnnnnnnnnnnnnnnnnnnnnnnnnnnnnnnnnnnnnnnnnnnnnnnnnnnnnnnnnnnnnnnnnnnnnnnnnnnnnnnnnnnnnnnnnnnnnnnnnnnnnnnnnnnnnnnnnnnnnnnnnnnnnnnnnnnnnnnnnnnnnnnnnnnnnnnnnnnnnnnnnnnnnnnnnnnnnnnnnnnnnnnnnnnnnnnnnnnnnnnnnnnnnnnnnnnnnnnnnnnnnnnnnnnnnnnnnnnnnnnnnnnnnnnnnnnnnnnnnnnnnnnnnnnnnnnnnnnnnnnnnnnnnnnnnnnnnnnnnnnnnnnnnnnnnnnnnnnnnnnnnnnnnnnnnnnnnnnnnnnnnnnnnnnnnnnnnnnnnnnnnnnnnnnnnnnnnnnnnnnnnnnnnnnnnnnnnnnnnnnnnnnnnnnnnnnnnnnnnnnnnnnnnnnnnnnnnnnnnnnnnnnnnnnnnnnnnnnnnnnnnnnnnnnnnnnnnnnnnnnnnnnnnnnnnnnnnnnnnnnnnnnnnnnnnnnnnnnnnnnnnnnnnnnnnnnnnnnnnnnnnnnnnnnnnnnnnnnnnnnnnnnnnnnnnnnnnnnnnnnnnnnnnnnnnnnnnnnnnnnnnnnnnnnnnnnnnnnnnnnnnnnnnnnnnnnnnnnnnnnnnnnnnnnnnnnnnnnnnnnnnnnnnnnnnnnnnnnnnnnnnnnnnnnnnnnnnnnnnnnnnnnnnnnnnnnnnnnnnnnnnnnnnnnnnnnnnnnnnnnnnnnnnnnnnnnnnnnnnnnnnnnnnnnnnnnnnnnnnnnnnnnnnnnnnnnnnnnnnnnnnnnnnnnnnnnnnnnnnnnnnnnnnnnnnnnnnnnnnnnnnnnnnnnnnnnnnnnnnnnnnnnnnnnnnnnnnnnnnnnnnnnnnnnnnnnnnnnnnnnnnnnnnnnnnnnnnnnnnnnnnnnnnnnnnnnnnnnnnnnnnnnnnnnnnnnnnnnnnnnnnnnnnnnnnnnnnnnnnnnnnnnnnnnnnnnnnnnnnnnnnnnnnnnnnnnnnnnnnnnnnnnnnnnnnnnnnnnnnnnnnnnnnnnnnnnnnnnnnnnnnnnnnnnnnnnnnnnnnnnnnnnnnnnnnnnnnnnnnnnnnnnnnnnnnnnnnnnnnnnnnnnnnnnnnnnnnnnnnnnnnnnnnnnnnnnnnnnnnnnnnnnnnnnnnnnnnnnnnnnnnnnnnnnnnnnnnnnnnnnnnnnnnnnnnnnnnnnnnnnnnnnnnnnnnnnnnnnnnnnnnnnnnnnnnnnnnnnnnnnnnnnnnnnnnnnnnnnnnnnnnnnnnnnnnnnnnnnnnnnnnnnnnnnnnnnnnnnnnnnnnnnnnnnnnnnnnnnnnnnnnnnnnnnnnnnnnnnnnnnnnnnnnnnnnnnnnnnnnnnnnnnnnnnnnnnnnnnnnnnnnnnnnnnnnnnnnnnnnnnnnnnnnnnnnnnnnnnnnnnnnnnnnnnnnnnnnnnnnnnnnnnnnnnnnnnnnnnnnnnnnnnnnnnnnnnnnnnnnnnnnnnnnnnnnnnnnnnnnnnnnnnnnnnnnnnnnnnnnnnnnnnnnnnnnnnnnnnnnnnnnnnnnnnnnnnnnnnnnnnnnnnnnnnnnnnnnnnnnnnnnnnnnnnnnnnnnnnnnnnnnnnnnnnnnnnnnnnnnnnnnnnnnnnnnnnnnnnnnnnnnnnnnnnnnnnnnnnnnnnnnnnnnnnnnnnnnnnnnnnnnnnnnnnnnnnnnnnnnnnnnnnnnnnnnnnnnnnnnnnnnnnnnnnnnnnnnnnnnnnnnnnnnnnnnnnnnnnnnnnnnnnnnnnnnnnnnnnnnnnnnnnnnnnnnnnnnnnnnnnnnnnnnnnnnnnnnnnnnnnnnnnnnnnnnnnnnnnnnnnnnnnnnnnnnnnnnnnnnnnnnnnnnnnnnnnnnnnnnnnnnnnnnnnnnnnnnnnnnnnnnnnnnnnnnnnnnnnnnnnnnnnnnnnnnnnnnnnnnnnnnnnnnnnnnnnnnnnnnnnnnnnnnnnnnnnnnnnnnnnnnnnnnnnnnnnnnnnnnnnnnnnnnnnnnnnnnnnnnnnnnnnnnnnnnnnnnnnnnnnnnnnnnnnnnnnnnnnnnnnnnnnnnnnnnnnnnnnnnnnnnnnnnnnnnnnnnnnnnnnnnnnnnnnnnnnnnnnnnnnnnnnnnnnnnnnnnnnnnnnnnnnnnnnnnnnnnnnnnnnnnnnnnnnnnnnnnnnnnnnnnnnnnnnnnnnnnnnnnnnnnnnnnnnnnnnnnnnnnnnnnnnnnnnnnnnnnnnnnnnnnnnnnnnnnnnnnnnnnnnnnnnnnnnnnnnnnnnnnnnnnnnnnnnnnnnnnnnnnnnnnnnnnnnnnnnnnnnnnnnnnnnnnnnnnnnnnnnnnnnnnnnnnnnnnnnnnnnnnnnnnnnnnnnnnnnnnnnnnnnnnnnnnnnnnnnnnnnnnnnnnnnnnnnnnnnnnnnnnnnnnnnnnnnnnnnnnnnnnnnnnnnnnnnnnnnnnnnnnnnnnnnnnnnnnnnnnnnnnnnnnnnnnnnnnnnnnnnnnnnnnnnnnnnnnnnnnnnnnnnnnnnnnnnnnnnnnnnnnnnnnnnnnnnnnnnnnnnnnnnnnnnnnnnnnnnnnnnnnnnnnnnnnnnnnnnnnnnnnnnnnnnnnnnnnnnnnnnnnnnnnnnnnnnnnnnnnnnnnnnnnnnnnnnnnnnnnnnnnnnnnnnnnnnnnnnnnnnnnnnnnnnnnnnnnnnnnnnnnnnnnnnnnnnnnnnnnnnnnnnnnnnnnnnnnnnnnnnnnnnnnnnnnnnnnnnnnnnnnnnnnnnnnnnnnnnnnnnnnnnnnnnnnnnnnnnnnnnnnnnnnnnnnnnnnnnnnnnnnnnnnnnnnnnnnnnnnnnnnnnnnnnnnnnnnnnnnnnnnnnnnnnnnnnnnnnnnnnnnnnnnnnnnnnnnnnnnnnnnnnnnnnnnnnnnnnnnnnnnnnnnnnnnnnnnnnnnnnnnnnnnnnnnnnnnnnnnnnnnnnnnnnnnnnnnnnnnnnnnnnnnnnnnnnnnnnnnnnnnnnnnnnnnnnnnnnnnnnnnnnnnnnnnnnnnnnnnnnnnnnnnnnnnnnnnnnnnnnnnnnnnnnnnnnnnnnnnnnnnnnnnnnnnnnnnnnnnnnnnnnnnnnnnnnnnnnnnnnnnnnnnnnnnnnnnnnnnnnnnnnnnnnnnnnnnnnnnnnnnnnnnnnnnnnnnnnnnnnnnnnnnnnnnnnnnnnnnnnnnnnnnnnnnnnnnnnnnnnnnnnnnnnnnnnnnnnnnnnnnnnnnnnnnnnnnnnnnnnnnnnnnnnnnnnnnnnnnnnnnnnnnnnnnnnnnnnnnnnnnnnnnnnnnnnnnnnnnnnnnnnnnnnnnnnnnnnnnnnnnnnnnnnnnnnnnnnnnnnnnnnnnnnnnnnnnnnnnnnnnnnnnnnnnnnnnnnnnnnnnnnnnnnnnnnnnnnnnnnnnnnnnnnnnnnnnnnnnnnnnnnnnnnnnnnnnnnnnnnnnnnnnnnnnnnnnnnnnnnnnnnnnnnnnnnnnnnnnnnnnnnnnnnnnnnnnnnnnnnnnnnnnnnnnnnnnnnnnnnnnnnnnnnnnnnnnnnnnnnnnnnnnnnnnnnnnnnnnnnnnnnnnnnnnnnnnnnnnnnnnnnnnnnnnnnnnnnnnnnnnnnnnnnnnnnnnnnnnnnnnnnnnnnnnnnnnnnnnnnnnnnnnnnnnnnnnnnnnnnnnnnnnnnnnnnnnnnnnnnnnnnnnnnnnnnnnnnnnnnnnnnnnnnnnnnnnnnnnnnnnnnnnnnnnnnnnnnnnnnnnnnnnnnnnnnnnnnnnnnnnnnnnnnnnnnnnnnnnnnnnnnnnnnnnnnnnnnnnnnnnnnnnnnnnnnnnnnnnnnnnnnnnnnnnnnnnnnnnnnnnnnnnnnnnnnnnnnnnnnnnnnnnnnnnnnnnnnnnnnnnnnnnnnnnnnnnnnnnnnnnnnnnnnnnnnnnnnnnnnnnnnnnnnnnnnnnnnnnnnnnnnnnnnnnnnnnnnnnnnnnnnnnnnnnnnnnnnnnnnnnnnnnnnnnnnnnnnnnnnnnnnnnnnnnnnnnnnnnnnnnnnnnnnnnnnnnnnnnnnnnnnnnnnnnnnnnnnnnnnnnnnnnnnnnnnnnnnnnnnnnnnnnnnnnnnnnnnnnnnnnnnnnnnnnnnnnnnnnnnnnnnnnnnnnnnnnnnnnnnnnnnnnnnnnnnnnnnnnnnnnnnnnnnnnnnnnnnnnnnnnnnnnnnnnnnnnnnnnnnnnnnnnnnnnnnnnnnnnnnnnnnnnnnnnnnnnnnnnnnnnnnnnnnnnnnnnnnnnnnnnnnnnnnnnnnnnnnnnnnnnnnnnnnnnnnnnnnnnnnnnnnnnnnnnnnnnnnnnnnnnnnnnnnnnnnnnnnnnnnnnnnnnnnnnnnnnnnnnnnnnnnnnnnnnnnnnnnnnnnnnnnnnnnnnnnnnnnnnnnnnnnnnnnnnnnnnnnnnnnnnnnnnnnnnnnnnnnnnnnnnnnnnnnnnnnnnnnnnnnnnnnnnnnnnnnnnnnnnnnnnnnnnnnnnnnnnnnnnnnnnnnnnnnnnnnnnnnnnnnnnnnnnnnnnnnnnnnnnnnnnnnnnnnnnnnnnnnnnnnnnnnnnnnnnnnnnnnnnnnnnnnnnnnnnnnnnnnnnnnnnnnnnnnnnnnnnnnnnnnnnnnnnnnnnnnnnnnnnnnnnnnnnnnnnnnnnnnnnnnnnnnnnnnnnnnnnnnnnnnnnnnnnnnnnnnnnnnnnnnnnnnnnnnnnnnnnnnnnnnnnnnnnnnnnnnnnnnnnnnnnnnnnnnnnnnnnnnnnnnnnnnnnnnnnnnnnnnnnnnnnnnnnnnnnnnnnnnnnnnnnnnnnnnnnnnnnnnnnnnnnnnnnnnnnnnnnnnnnnnnnnnnnnnnnnnnnnnnnnnnnnnnnnnnnnnnnnnnnnnnnnnnnnnnnnnnnnnnnnnnnnnnnnnnnnnnnnnnnnnnnnnnnnnnnnnnnnnnnnnnnnnnnnnnnnnnnnnnnnnnnnnnnnnnnnnnnnnnnnnnnnnnnnnnnnnnnnnnnnnnnnnnnnnnnnnnnnnnnnnnnnnnnnnnnnnnnnnnnnnnnnnnnnnnnnnnnnnnnnnnnnnnnnnnnnnnnnnnnnnnnnnnnnnnnnnnnnnnnnnnnnnnnnnnnnnnnnnnnnnnnnnnnnnnnnnnnnnnnnnnnnnnnnnnnnnnnnnnnnnnnnnnnnnnnnnnnnnnnnnnnnnnnnnnnnnnnnnnnnnnnnnnnnnnnnnnnnnnnnnnnnnnnnnnnnnnnnnnnnnnnnnnnnnnnnnnnnnnnnnnnnnnnnnnnnnnnnnnnnnnnnnnnnnnnnnnnnnnnnnnnnnnnnnnnnnnnnnnnnnnnnnnnnnnnnnnnnnnnnnnnnnnnnnnnnnnnnnnnnnnnnnnnnnnnnnnnnnnnnnnnnnnnnnnnnnnnnnnnnnnnnnnnnnnnnnnnnnnnnnnnnnnnnnnnnnnnnnnnnnnnnnnnnnnnnnnnnnnnnnnnnnnnnnnnnnnnnnnnnnnnnnnnnnnnnnnnnnnnnnnnnnnnnnnnnnnnnnnnnnnnnnnnnnnnnnnnnnnnnnnnnnnnnnnnnnnnnnnnnnnnnnnnnnnnnnnnnnnnnnnnnnnnnnnnnnnnnnnnnnnnnnnnnnnnnnnnnnnnnnnnnnnnnnnnnnnnnnnnnnnnnnnnnnnnnnnnnnnnnnnnnnnnnnnnnnnnnnnnnnnnnnnnnnnnnnnnnnnnnnnnnnnnnnnnnnnnnnnnnnnnnnnnnnnnnnnnnnnnnnnnnnnnnnnnnnnnnnnnnnnnnnnnnnnnnnnnnnnnnnnnnnnnnnnnnnnnnnnnnnnnnnnnnnnnnnnnnnnnnnnnnnnnnnnnnnnnnnnnnnnnnnnnnnnnnnnnnnnnnnnnnnnnnnnnnnnnnnnnnnnnnnnnnnnnnnnnnnnnnnnnnnnnnnnnnnnnnnnnnnnnnnnnnnnnnnnnnnnnnnnnnnnnnnnnnnnnnnnnnnnnnnnnnnnnnnnnnnnnnnnnnnnnnnnnnnnnnnnnnnnnnnnnnnnnnnnnnnnnnnnnnnnnnnnnnnnnnnnnnnnnnnnnnnnnnnnnnnnnnnnnnnnnnnnnnnnnnnnnnnnnnnnnnnnnnnnnnnnnnnnnnnnnnnnnnnnnnnnnnnnnnnnnnnnnnnnnnnnnnnnnnnnnnnnnnnnnnnnnnnnnnnnnnnnnnnnnnnnnnnnnnnnnnnnnnnnnnnnnnnnnnnnnnnnnnnnnnnnnnnnnnnnnnnnnnnnnnnnnnnnnnnnnnnnnnnnnnnnnnnnnnnnnnnnnnnnnnnnnnnnnnnnnnnnnnnnnnnnnnnnnnnnnnnnnnnnnnnnnnnnnnnnnnnnnnnnnnnnnnnnnnnnnnnnnnnnnnnnnnnnnnnnnnnnnnnnnnnnnnnnnnnnnnnnnnnnnnnnnnnnnnnnnnnnnnnnnnnnnnnnnnnnnnnnnnnnnnnnnnnnnnnnnnnnnnnnnnnnnnnnnnnnnnnnnnnnnnnnnnnnnnnnnnnnnnnnnnnnnnnnnnnnnnnnnnnnnnnnnnnnnnnnnnnnnnnnnnnnnnnnnnnnnnnnnnnnnnnnnnnnnnnnnnnnnnnnnnnnnnnnnnnnnnnnnnnnnnnnnnnnnnnnnnnnnnnnnnnnnnnnnnnnnnnnnnnnnnnnnnnnnnnnnnnnnnnnnnnnnnnnnnnnnnnnnnnnnnnnnnnnnnnnnnnnnnnnnnnnnnnnnnnnnnnnnnnnnnnnnnnnnnnnnnnnnnnnnnnnnnnnnnnnnnnnnnnnnnnnnnnnnnnnnnnnnnnnnnnnnnnnnnnnnnnnnnnnnnnnnnnnnnnnnnnnnnnnnnnnnnnnnnnnnnnnnnnnnnnnnnnnnnnnnnnnnnnnnnnnnnnnnnnnnnnnnnnnnnnnnnnnnnnnnnnnnnnnnnnnnnnnnnnnnnnnnnnnnnnnnnnnnnnnnnnnnnnnnnnnnnnnnnnnnnnnnnnnnnnnnnnnnnnnnnnnnnnnnnnnnnnnnnnnnnnnnnnnnnnnnnnnnnnnnnnnnnnnnnnnnnnnnnnnnnnnnnnnnnnnnnnnnnnnnnnnnnnnnnnnnnnnnnnnnnnnnnnnnnnnnnnnnnnnnnnnnnnnnnnnnnnnnnnnnnnnnnnnnnnnnnnnnnnnnnnnnnnnnnnnnnnnnnnnnnnnnnnnnnnnnnnnnnnnnnnnnnnnnnnnnnnnnnnnnnnnnnnnnnnnnnnnnnnnnnnnnnnnnnnnnnnnnnnnnnnnnnnnnnnnnnnnnnnnnnnnnnnnnnnnnnnnnnnnnnnnnnnnnnnnnnnnnnnnnnnnnnnnnnnnnnnnnnnnnnnnnnnnnnnnnnnnnnnnnnnnnnnnnnnnnnnnnnnnnnnnnnnnnnnnnnnnnnnnnnnnnnnnnnnnnnnnnnnnnnnnnnnnnnnnnnnnnnnnnnnnnnnnnnnnnnnnnnnnnnnnnnnnnnnnnnnnnnnnnnnnnnnnnnnnnnnnnnnnnnnnnnnnnnnnnnnnnnnnnnnnnnnnnnnnnnnnnnnnnnnnnnnnnnnnnnnnnnnnnnnnnnnnnnnnnnnnnnnnnnnnnnnnnnnnnnnnnnnnnnnnnnnnnnnnnnnnnnnnnnnnnnnnnnnnnnnnnnnnnnnnnnnnnnnnnnnnnnnnnnnnnnnnnnnnnnnnnnnnnnnnnnnnnnnnnnnnnnnnnnnnnnnnnnnnnnnnnnnnnnnnnnnnnnnnnnnnnnnnnnnnnnnnnnnnnnnnnnnnnnnnnnnnnnnnnnnnnnnnnnnnnnnnnnnnnnnnnnnnnnnnnnnnnnnnnnnnnnnnnnnnnnnnnnnnnnnnnnnnnnnnnnnnnnnnnnnnnnnnnnnnnnnnnnnnnnnnnnnnnnnnnnnnnnnnnnnnnnnnnnnnnnnnnnnnnnnnnnnnnnnnnnnnnnnnnnnnnnnnnnnnnnnnnnnnnnnnnnnnnnnnnnnnnnnnnnnnnnnnnnnnnnnnnnnnnnnnnnnnnnnnnnnnnnnnnnnnnnnnnnnnnnnnnnnnnnnnnnnnnnnnnnnnnnnnnnnnnnnnnnnnnnnnnnnnnnnnnnnnnnnnnnnnnnnnnnnnnnnnnnnnnnnnnnnnnnnnnnnnnnnnnnnnnnnnnnnnnnnnnnnnnnnnnnnnnnnnnnnnnnnnnnnnnnnnnnnnnnnnnnnnnnnnnnnnnnnnnnnnnnnnnnnnnnnnnnnnnnnnnnnnnnnnnnnnnnnnnnnnnnnnnnnnnnnnnnnnnnnnnnnnnnnnnnnnnnnnnnnnnnnnnnnnnnnnnnnnnnnnnnnnnnnnnnnnnnnnnnnnnnnnnnnnnnnnnnnnnnnnnnnnnnnnnnnnnnnnnnnnnnnnnnnnnnnnnnnnnnnnnnnnnnnnnnnnnnnnnnnnnnnnnnnnnnnnnnnnnnnnnnnnnnnnnnnnnnnnnnnnnnnnnnnnnnnnnnnnnnnnnnnnnnnnnnnnnnnnnnnnnnnnnnnnnnnnnnnnnnnnnnnnnnnnnnnnnnnnnnnnnnnnnnnnnnnnnnnnnnnnnnnnnnnnnnnnnnnnnnnnnnnnnnnnnnnnnnnnnnnnnnnnnnnnnnnnnnnnnnnnnnnnnnnnnnnnnnnnnnnnnnnnnnnnnnnnnnnnnnnnnnnnnnnnnnnnnnnnnnnnnnnnnnnnnnnnnnnnnnnnnnnnnnnnnnnnnnnnnnnnnnnnnnnnnnnnnnnnnnnnnnnnnnnnnnnnnnnnnnnnnnnnnnnnnnnnnnnnnnnnnnnnnnnnnnnnnnnnnnnnnnnnnnnnnnnnnnnnnnnnnnnnnnnnnnnnnnnnnnnnnnnnnnnnnnnnnnnnnnnnnnnnnnnnnnnnnnnnnnnnnnnnnnnnnnnnnnnnnnnnnnnnnnnnnnnnnnnnnnnnnnnnnnnnnnnnnnnnnnnnnnnnnnnnnnnnnnnnnnnnnnnnnnnnnnnnnnnnnnnnnnnnnnnnnnnnnnnnnnnnnnnnnnnnnnnnnnnnnnnnnnnnnnnnnnnnnnnnnnnnnnnnnnnnnnnnnnnnnnnnnnnnnnnnnnnnnnnnnnnnnnnnnnnnnnnnnnnnnnnnnnnnnnnnnnnnnnnnnnnnnnnnnnnnnnnnnnnnnnnnnnnnnnnnnnnnnnnnnnnnnnnnnnnnnnnnnnnnnnnnnnnnnnnnnnnnnnnnnnnnnnnnnnnnnnnnnnnnnnnnnnnnnnnnnnnnnnnnnnnnnnnnnnnnnnnnnnnnnnnnnnnnnnnnnnnnnnnnnnnnnnnnnnnnnnnnnnnnnnnnnnnnnnnnnnnnnnnnnnnnnnnnnnnnnnnnnnnnnnnnnnnnnnnnnnnnnnnnnnnnnnnnnnnnnnnnnnnnnnnnnnnnnnnnnnnnnnnnnnnnnnnnnnnnnnnnnnnnnnnnnnnnnnnnnnnnnnnnnnnnnnnnnnnnnnnnnnnnnnnnnnnnnnnnnnnnnnnnnnnnnnnnnnnnnnnnnnnnnnnnnnnnnnnnnnnnnnnnnnnnnnnnnnnnnnnnnnnnnnnnnnnnnnnnnnnnnnnnnnnnnnnnnnnnnnnnnnnnnnnnnnnnnnnnnnnnnnnnnnnnnnnnnnnnnnnnnnnnnnnnnnnnnnnnnnnnnnnnnnnnnnnnnnnnnnnnnnnnnnnnnnnnnnnnnnnnnnnnnnnnnnnnnnnnnnnnnnnnnnnnnnnnnnnnnnnnnnnnnnnnnnnnnnnnnnnnnnnnnnnnnnnnnnnnnnnnnnnnnnnnnnnnnnnnnnnnnnnnnnnnnnnnnnnnnnnnnnnnnnnnnnnnnnnnnnnnnnnnnnnnnnnnnnnnnnnnnnnnnnnnnnnnnnnnnnnnnnnnnnnnnnnnnnnnnnnnnnnnnnnnnnnnnnnnnnnnnnnnnnnnnnnnnnnnnnnnnnnnnnnnnnnnnnnnnnnnnnnnnnnnnnnnnnnnnnnnnnnnnnnnnnnnnnnnnnnnnnnnnnnnnnnnnnnnnnnnnnnnnnnnnnnnnnnnnnnnnnnnnnnnnnnnnnnnnnnnnnnnnnnnnnnnnnnnnnnnnnnnnnnnnnnnnnnnnnnnnnnnnnnnnnnnnnnnnnnnnnnnnnnnnnnnnnnnnnnnnnnnnnnnnnnnnnnnnnnnnnnnnnnnnnnnnnnnnnnnnnnnnnnnnnnnnnnnnnnnnnnnnnnnnnnnnnnnnnnnnnnnnnnnnnnnnnnnnnnnnnnnnnnnnnnnnnnnnnnnnnnnnnnnnnnnnnnnnnnnnnnnnnnnnnnnnnnnnnnnnnnnnnnnnnnnnnnnnnnnnnnnnnnnnnnnnnnnnnnnnnnnnnnnnnnnnnnnnnnnnnnnnnnnnnnnnnnnnnnnnnnnnnnnnnnnnnnnnnnnnnnnnnnnnnnnnnnnnnnnnnnnnnnnnnnnnnnnnnnnnnnnnnnnnnnnnnnnnnnnnnnnnnnnnnnnnnnnnnnnnnnnnnnnnnnnnnnnnnnnnnnnnnnnnnnnnnnnnnnnnnnnnnnnnnnnnnnnnnnnnnnnnnnnnnnnnnnnnnnnnnnnnnnnnnnnnnnnnnnnnnnnnnnnnnnnnnnnnnnnnnnnnnnnnnnnnnnnnnnnnnnnnnnnnnnnnnnnnnnnnnnnnnnnnnnnnnnnnnnnnnnnnnnnnnnnnnnnnnnnnnnnnnnnnnnnnnnnnnnnnnnnnnnnnnnnnnnnnnnnnnnnnnnnnnnnnnnnnnnnnnnnnnnnnnnnnnnnnnnnnnnnnnnnnnnnnnnnnnnnnnnnnnnnnnnnnnnnnnnnnnnnnnnnnnnnnnnnnnnnnnnnnnnnnnnnnnnnnnnnnnnnnnnnnnnnnnnnnnnnnnnnnnnnnnnnnnnnnnnnnnnnnnnnnnnnnnnnnnnnnnnnnnnnnnnnnnnnnnnnnnnnnnnnnnnnnnnnnnnnnnnnnnnnnnnnnnnnnnnnnnnnnnnnnnnnnnnnnnnnnnnnnnnnnnnnnnnnnnnnnnnnnnnnnnnnnnnnnnnnnnnnnnnnnnnnnnnnnnnnnnnnnnnnnnnnnnnnnnnnnnnnnnnnnnnnnnnnnnnnnnnnnnnnnnnnnnnnnnnnnnnnnnnnnnnnnnnnnnnnnnnnnnnnnnnnnnnnnnnnnnnnnnnnnnnnnnnnnnnnnnnnnnnnnnnnnnnnnnnnnnnnnnnnnnnnnnnnnnnnnnnnnnnnnnnnnnnnnnnnnnnnnnnnnnnnnnnnnnnnnnnnnnnnnnnnnnnnnnnnnnnnnnnnnnnnnnnnnnnnnnnnnnnnnnnnnnnnnnnnnnnnnnnnnnnnnnnnnnnnnnnnnnnnnnnnnnnnnnnnnnnnnnnnnnnnnnnnnnnnnnnnnnnnnnnnnnnnnnnnnnnnnnnnnnnnnnnnnnnnnnnnnnnnnnnnnnnnnnnnnnnnnnnnnnnnnnnnnnnnnnnnnnnnnnnnnnnnnnnnnnnnnnnnnnnnnnnnnnnnnnnnnnnnnnnnnnnnnnnnnnnnnnnnnnnnnnnnnnnnnnnnnnnnnnnnnnnnnnnnnnnnnnnnnnnnnnnnnnnnnnnnnnnnnnnnnnnnnnnnnnnnnnnnnnnnnnnnnnnnnnnnnnnnnnnnnnnnnnnnnnnnnnnnnnnnnnnnnnnnnnnnnnnnnnnnnnnnnnnnnnnnnnnnnnnnnnnnnnnnnnnnnnnnnnnnnnnnnnnnnnnnnnnnnnnnnnnnnnnnnnnnnnnnnnnnnnnnnnnnnnnnnnnnnnnnnnnnnnnnnnnnnnnnnnnnnnnnnnnnnnnnnnnnnnnnnnnnnnnnnnnnnnnnnnnnnnnnnnnnnnnnnnnnnnnnnnnnnnnnnnnnnnnnnnnnnnnnnnnnnnnnnnnnnnnnnnnnnnnnnnnnnnnnnnnnnnnnnnnnnnnnnnnnnnnnnnnnnnnnnnnnnnnnnnnnnnnnnnnnnnnnnnnnnnnnnnnnnnnnnnnnnnnnnnnnnnnnnnnnnnnnnnnnnnnnnnnnnnnnnnnnnnnnnnnnnnnnnnnnnnnnnnnnnnnnnnnnnnnnnnnnnnnnnnnnnnnnnnnnnnnnnnnnnnnnnnnnnnnnnnnnnnnnnnnnnnnnnnnnnnnnnnnnnnnnnnnnnnnnnnnnnnnnnnnnnnnnnnnnnnnnnnnnnnnnnnnnnnnnnnnnnnnnnnnnnnnnnnnnnnnnnnnnnnnnnnnnnnnnnnnnnnnnnnnnnnnnnnnnnnnnnnnnnnnnnnnnnnnnnnnnnnnnnnnnnnnnnnnnnnnnnnnnnnnnnnnnnnnnnnnnnnnnnnnnnnnnnnnnnnnnnnnnnnnnnnnnnnnnnnnnnnnnnnnnnnnnnnnnnnnnnnnnnnnnnnnnnnnnnnnnnnnnnnnnnnnnnnnnnnnnnnnnnnnnnnnnnnnnnnnnnnnnnnnnnnnnnnnnnnnnnnnnnnnnnnnnnnnnnnnnnnnnnnnnnnnnnnnnnnnnnnnnnnnnnnnnnnnnnnnnnnnnnnnnnnnnnnnnnnnnnnnnnnnnnnnnnnnnnnnnnnnnnnnnnnnnnnnnnnnnnnnnnnnnnnnnnnnnnnnnnnnnnnnnnnnnnnnnnnnnnnnnnnnnnnnnnnnnnnnnnnnnnnnnnnnnnnnnnnnnnnnnnnnnnnnnnnnnnnnnnnnnnnnnnnnnnnnnnnnnnnnnnnnnnnnnnnnnnnnnnnnnnnnnnnnnnnnnnnnnnnnnnnnnnnnnnnnnnnnnnnnnnnnnnnnnnnnnnnnnnnnnnnnnnnnnnnnnnnnnnnnnnnnnnnnnnnnnnnnnnnnnnnnnnnnnnnnnnnnnnnnnnnnnnnnnnnnnnnnnnnnnnnnnnnnnnnnnnnnnnnnnnnnnnnnnnnnnnnnnnnnnnnnnnnnnnnnnnnnnnnnnnnnnnnnnnnnnnnnnnnnnnnnnnnnnnnnnnnnnnnnnnnnnnnnnnnnnnnnnnnnnnnnnnnnnnnnnnnnnnnnnnnnnnnnnnnnnnnnnnnnnnnnnnnnnnnnnnnnnnnnnnnnnnnnnnnnnnnnnnnnnnnnnnnnnnnnnnnnnnnnnnnnnnnnnnnnnnnnnnnnnnnnnnnnnnnnnnnnnnnnnnnnnnnnnnnnnnnnnnnnnnnnnnnnnnnnnnnnnnnnnnnnnnnnnnnnnnnnnnnnnnnnnnnnnnnnnnnnnnnnnnnnnnnnnnnnnnnnnnnnnnnnnnnnnnnnnnnnnnnnnnnnnnnnnnnnnnnnnnnnnnnnnnnnnnnnnnnnnnnnnnnnnnnnnnnnnnnnnnnnnnnnnnnnnnnnnnnnnnnnnnnnnnnnnnnnnnnnnnnnnnnnnnnnnnnnnnnnnnnnnnnnnnnnnnnnnnnnnnnnnnnnnnnnnnnnnnnnnnnnnnnnnnnnnnnnnnnnnnnnnnnnnnnnnnnnnnnnnnnnnnnnnnnnnnnnnnnnnnnnnnnnnnnnnnnnnnnnnnnnnnnnnnnnnnnnnnnnnnnnnnnnnnnnnnnnnnnnnnnnnnnnnnnnnnnnnnnnnnnnnnnnnnnnnnnnnnnnnnnnnnnnnnnnnnnnnnnnnnnnnnnnnnnnnnnnnnnnnnnnnnnnnnnnnnnnnnnnnnnnnnnnnnnnnnnnnnnnnnnnnnnnnnnnnnnnnnnnnnnnnnnnnnnnnnnnnnnnnnnnnnnnnnnnnnnnnnnnnnnnnnnnnnnnnnnnnnnnnnnnnnnnnnnnnnnnnnnnnnnnnnnnnnnnnnnnnnnnnnnnnnnnnnnnnnnnnnnnnnnnnnnnnnnnnnnnnnnnnnnnnnnnnnnnnnnnnnnnnnnnnnnnnnnnnnnnnnnnnnnnnnnnnnnnnnnnnnnnnnnnnnnnnnnnnnnnnnnnnnnnnnnnnnnnnnnnnnnnnnnnnnnnnnnnnnnnnnnnnnnnnnnnnnnnnnnnnnnnnnnnnnnnnnnnnnnnnnnnnnnnnnnnnnnnnnnnnnnnnnnnnnnnnnnnnnnnnnnnnnnnnnnnnnnnnnnnnnnnnnnnnnnnnnnnnnnnnnnnnnnnnnnnnnnnnnnnnnnnnnnnnnnnnnnnnnnnnnnnnnnnnnnnnnnnnnnnnnnnnnnnnnnnnnnnnnnnnnnnnnnnnnnnnnnnnnnnnnnnnnnnnnnnnnnnnnnnnnnnnnnnnnnnnnnnnnnnnnnnnnnnnnnnnnnnnnnnnnnnnnnnnnnnnnnnnnnnnnnnnnnnnnnnnnnnnnnnnnnnnnnnnnnnnnnnnnnnnnnnnnnnnnnnnnnnnnnnnnnnnnnnnnnnnnnnnnnnnnnnnnnnnnnnnnnnnnnnnnnnnnnnnnnnnnnnnnnnnnnnnnnnnnnnnnnnnnnnnnnnnnnnnnnnnnnnnnnnnnnnnnnnnnnnnnnnnnnnnnnnnnnnnnnnnnnnnnnnnnnnnnnnnnnnnnnnnnnnnnnnnnnnnnnnnnnnnnnnnnnnnnnnnnnnnnnnnnnnnnnnnnnnnnnnnnnnnnnnnnnnnnnnnnnnnnnnnnnnnnnnnnnnnnnnnnnnnnnnnnnnnnnnnnnnnnnnnnnnnnnnnnnnnnnnnnnnnnnnnnnnnnnnnnnnnnnnnnnnnnnnnnnnnnnnnnnnnnnnnnnnnnnnnnnnnnnnnnnnnnnnnnnnnnnnnnnnnnnnnnnnnnnnnnnnnnnnnnnnnnnnnnnnnnnnnnnnnnnnnnnnnnnnnnnnnnnnnnnnnnnnnnnnnnnnnnnnnnnnnnnnnnnnnnnnnnnnnnnnnnnnnnnnnnnnnnnnnnnnnnnnnnnnnnnnnnnnnnnnnnnnnnnnnnnnnnnnnnnnnnnnnnnnnnnnnnnnnnnnnnnnnnnnnnnnnnnnnnnnnnnnnnnnnnnnnnnnnnnnnnnnnnnnnnnnnnnnnnnnnnnnnnnnnnnnnnnnnnnnnnnnnnnnnnnnnnnnnnnnnnnnnnnnnnnnnnnnnnnnnnnnnnnnnnnnnnnnnnnnnnnnnnnnnnnnnnnnnnnnnnnnnnnnnnnnnnnnnnnnnnnnnnnnnnnnnnnnnnnnnnnnnnnnnnnnnnnnnnnnnnnnnnnnnnnnnnnnnnnnnnnnnnnnnnnnnnnnnnnnnnnnnnnnnnnnnnnnnnnnnnnnnnnnnnnnnnnnnnnnnnnnnnnnnnnnnnnnnnnnnnnnnnnnnnnnnnnnnnnnnnnnnnnnnnnnnnnnnnnnnnnnnnnnnnnnnnnnnnnnnnnnnnnnnnnnnnnnnnnnnnnnnnnnnnnnnnnnnnnnnnnnnnnnnnnnnnnnnnnnnnnnnnnnnnnnnnnnnnnnnnnnnnnnnnnnnnnnnnnnnnnnnnnnnnnnnnnnnnnnnnnnnnnnnnnnnnnnnnnnnnnnnnnnnnnnnnnnnnnnnnnnnnnnnnnnnnnnnnnnnnnnnnnnnnnnnnnnnnnnnnnnnnnnnnnnnnnnnnnnnnnnnnnnnnnnnnnnnnnnnnnnnnnnnnnnnnnnnnnnnnnnnnnnnnnnnnnnnnnnnnnnnnnnnnnnnnnnnnnnnnnnnnnnnnnnnnnnnnnnnnnnnnnnnnnnnnnnnnnnnnnnnnnnnnnnnnnnnnnnnnnnnnnnnnnnnnnnnnnnnnnnnnnnnnnnnnnnnnnnnnnnnnnnnnnnnnnnnnnnnnnnnnnnnnnnnnnnnnnnnnnnnnnnnnnnnnnnnnnnnnnnnnnnnnnnnnnnnnnnnnnnnnnnnnnnnnnnnnnnnnnnnnnnnnnnnnnnnnnnnnnnnnnnnnnnnnnnnnnnnnnnnnnnnnnnnnnnnnnnnnnnnnnnnnnnnnnnnnnnnnnnnnnnnnnnnnnnnnnnnnnnnnnnnnnnnnnnnnnnnnnnnnnnnnnnnnnnnnnnnnnnnnnnnnnnnnnnnnnnnnnnnnnnnnnnnnnnnnnnnnnnnnnnnnnnnnnnnnnnnnnnnnnnnnnnnnnnnnnnnnnnnnnnnnnnnnnnnnnnnnnnnnnnnnnnnnnnnnnnnnnnnnnnnnnnnnnnnnnnnnnnnnnnnnnnnnnnnnnnnnnnnnnnnnnnnnnnnnnnnnnnnnnnnnnnnnnnnnnnnnnnnnnnnnnnnnnnnnnnnnnnnnnnnnnnnnnnnnnnnnnnnnnnnnnnnnnnnnnnnnnnnnnnnnnnnnnnnnnnnnnnnnnnnnnnnnnnnnnnnnnnnnnnnnnnnnnnnnnnnnnnnnnnnnnnnnnnnnnnnnnnnnnnnnnnnnnnnnnnnnnnnnnnnnnnnnnnnnnnnnnnnnnnnnnnnnnnnnnnnnnnnnnnnnnnnnnnnnnnnnnnnnnnnnnnnnnnnnnnnnnnnnnnnnnnnnnnnnnnnnnnnnnnnnnnnnnnnnnnnnnnnnnnnnnnnnnnnnnnnnnnnnnnnnnnnnnnnnnnnnnnnnnnnnnnnnnnnnnnnnnnnnnnnnnnnnnnnnnnnnnnnnnnnnnnnnnnnnnnnnnnnnnnnnnnnnnnnnnnnnnnnnnnnnnnnnnnnnnnnnnnnnnnnnnnnnnnnnnnnnnnnnnnnnnnnnnnnnnnnnnnnnnnnnnnnnnnnnnnnnnnnnnnnnnnnnnnnnnnnnnnnnnnnnnnnnnnnnnnnnnnnnnnnnnnnnnnnnnnnnnnnnnnnnnnnnnnnnnnnnnnnnnnnnnnnnnnnnnnnnnnnnnnnnnnnnnnnnnnnnnnnnnnnnnnnnnnnnnnnnnnnnnnnnnnnnnnnnnnnnnnnnnnnnnnnnnnnnnnnnnnnnnnnnnnnnnnnnnnnnnnnnnnnnnnnnnnnnnnnnnnnnnnnnnnnnnnnnnnnnnnnnnnnnnnnnnnnnnnnnnnnnnnnnnnnnnnnnnnnnnnnnnnnnnnnnnnnnnnnnnnnnnnnnnnnnnnnnnnnnnnnnnnnnnnnnnnnnnnnnnnnnnnnnnnnnnnnnnnnnnnnnnnnnnnnnnnnnnnnnnnnnnnnnnnnnnnnnnnnnnnnnnnnnnnnnnnnnnnnnnnnnnnnnnnnnnnnnnnnnnnnnnnnnnnnnnnnnnnnnnnnnnnnnnnnnnnnnnnnnnnnnnnnnnnnnnnnnnnnnnnnnnnnnnnnnnnnnnnnnnnnnnnnnnnnnnnnnnnnnnnnnnnnnnnnnnnnnnnnnnnnnnnnnnnnnnnnnnnnnnnnnnnnnnnnnnnnnnnnnnnnnnnnnnnnnnnnnnnnnnnnnnnnnnnnnnnnnnnnnnnnnnnnnnnnnnnnnnnnnnnnnnnnnnnnnnnnnnnnnnnnnnnnnnnnnnnnnnnnnnnnnnnnnnnnnnnnnnnnnnnnnnnnnnnnnnnnnnnnnnnnnnnnnnnnnnnnnnnnnnnnnnnnnnnnnnnnnnnnnnnnnnnnnnnnnnnnnnnnnnnnnnnnnnnnnnnnnnnnnnnnnnnnnnnnnnnnnnnnnnnnnnnnnnnnnnnnnnnnnnnnnnnnnnnnnnnnnnnnnnnnnnnnnnnnnnnnnnnnnnnnnnnnnnnnnnnnnnnnnnnnnnnnnnnnnnnnnnnnnnnnnnnnnnnnnnnnnnnnnnnnnnnnnnnnnnnnnnnnnnnnnnnnnnnnnnnnnnnnnnnnnnnnnnnnnnnnnnnnnnnnnnnnnnnnnnnnnnnnnnnnnnnnnnnnnnnnnnnnnnnnnnnnnnnnnnnnnnnnnnnnnnnnnnnnnnnnnnnnnnnnnnnnnnnnnnnnnnnnnnnnnnnnnnnnnnnnnnnnnnnnnnnnnnnnnnnnnnnnnnnnnnnnnnnnnnnnnnnnnnnnnnnnnnnnnnnnnnnnnnnnnnnnnnnnnnnnnnnnnnnnnnnnnnnnnnnnnnnnnnnnnnnnnnnnnnnnnnnnnnnnnnnnnnnnnnnnnnnnnnnnnnnnnnnnnnnnnnnnnnnnnnnnnnnnnnnnnnnnnnnnnnnnnnnnnnnnnnnnnnnnnnnnnnnnnnnnnnnnnnnnnnnnnnnnnnnnnnnnnnnnnnnnnnnnnnnnnnnnnnnnnnnnnnnnnnnnnnnnnnnnnnnnnnnnnnnnnnnnnnnnnnnnnnnnnnnnnnnnnnnnnnnnnnnnnnnnnnnnnnnnnnnnnnnnnnnnnnnnnnnnnnnnnnnnnnnnnnnnnnnnnnnnnnnnnnnnnnnnnnnnnnnnnnnnnnnnnnnnnnnnnnnnnnnnnnnnnnnnnnnnnnnnnnnnnnnnnnnnnnnnnnnnnnnnnnnnnnnnnnnnnnnnnnnnnnnnnnnnnnnnnnnnnnnnnnnnnnnnnnnnnnnnnnnnnnnnnnnnnnnnnnnnnnnnnnnnnnnnnnnnnnnnnnnnnnnnnnnnnnnnnnnnnnnnnnnnnnnnnnnnnnnnnnnnnnnnnnnnnnnnnnnnnnnnnnnnnnnnnnnnnnnnnnnnnnnnnnnnnnnnnnnnnnnnnnnnnnnnnnnnnnnnnnnnnnnnnnnnnnnnnnnnnnnnnnnnnnnnnnnnnnnnnnnnnnnnnnnnnnnnnnnnnnnnnnnnnnnnnnnnnnnnnnnnnnnnnnnnnnnnnnnnnnnnnnnnnnnnnnnnnnnnnnnnnnnnnnnnnnnnnnnnnnnnnnnnnnnnnnnnnnnnnnnnnnnnnnnnnnnnnnnnnnnnnnnnnnnnnnnnnnnnnnnnnnnnnnnnnnnnnnnnnnnnnnnnnnnnnnnnnnnnnnnnnnnnnnnnnnnnnnnnnnnnnnnnnnnnnnnnnnnnnnnnnnnnnnnnnnnnnnnnnnnnnnnnnnnnnnnnnnnnnnnnnnnnnnnnnnnnnnnnnnnnnnnnnnnnnnnnnnnnnnnnnnnnnnnnnnnnnnnnnnnnnnnnnnnnnnnnnnnnnnnnnnnnnnnnnnnnnnnnnnnnnnnnnnnnnnnnnnnnnnnnnnnnnnnnnnnnnnnnnnnnnnnnnnnnnnnnnnnnnnnnnnnnnnnnnnnnnnnnnnnnnnnnnnnnnnnnnnnnnnnnnnnnnnnnnnnnnnnnnnnnnnnnnnnnnnnnnnnnnnnnnnnnnnnnnnnnnnnnnnnnnnnnnnnnnnnnnnnnnnnnnnnnnnnnnnnnnnnnnnnnnnnnnnnnnnnnnnnnnnnnnnnnnnnnnnnnnnnnnnnnnnnnnnnnnnnnnnnnnnnnnnnnnnnnnnnnnnnnnnnnnnnnnnnnnnnnnnnnnnnnnnnnnnnnnnnnnnnnnnnnnnnnnnnnnnnnnnnnnnnnnnnnnnnnnnnnnnnnnnnnnnnnnnnnnnnnnnnnnnnnnnnnnnnnnnnnnnnnnnnnnnnnnnnnnnnnnnnnnnnnnnnnnnnnnnnnnnnnnnnnnnnnnnnnnnnnnnnnnnnnnnnnnnnnnnnnnnnnnnnnnnnnnnnnnnnnnnnnnnnnnnnnnnnnnnnnnnnnnnnnnnnnnnnnnnnnnnnnnnnnnnnnnnnnnnnnnnnnnnnnnnnnnnnnnnnnnnnnnnnnnnnnnnnnnnnnnnnnnnnnnnnnnnnnnnnnnnnnnnnnnnnnnnnnnnnnnnnnnnnnnnnnnnnnnnnnnnnnnnnnnnnnnnnnnnnnnnnnnnnnnnnnnnnnnnnnnnnnnnnnnnnnnnnnnnnnnnnnnnnnnnnnnnnnnnnnnnnnnnnnnnnnnnnnnnnnnnnnnnnnnnnnnnnnnnnnnnnnnnnnnnnnnnnnnnnnnnnnnnnnnnnnnnnnnnnnnnnnnnnnnnnnnnnnnnnnnnnnnnnnnnnnnnnnnnnnnnnnnnnnnnnnnnnnnnnnnnnnnnnnnnnnnnnnnnnnnnnnnnnnnnnnnnnnnnnnnnnnnnnnnnnnnnnnnnnnnnnnnnnnnnnnnnnnnnnnnnnnnnnnnnnnnnnnnnnnnnnnnnnnnnnnnnnnnnnnnnnnnnnnnnnnnnnnnnnnnnnnnnnnnnnnnnnnnnnnnnnnnnnnnnnnnnnnnnnnnnnnnnnnnnnnnnnnnnnnnnnnnnnnnnnnnnnnnnnnnnnnnnnnnnnnnnnnnnnnnnnnnnnnnnnnnnnnnnnnnnnnnnnnnnnnnnnnnnnnnnnnnnnnnnnnnnnnnnnnnnnnnnnnnnnnnnnnnnnnnnnnnnnnnnnnnnnnnnnnnnnnnnnnnnnnnnnnnnnnnnnnnnnnnnnnnnnnnnnnnnnnnnnnnnnnnnnnnnnnnnnnnnnnnnnnnnnnnnnnnnnnnnnnnnnnnnnnnnnnnnnnnnnnnnnnnnnnnnnnnnnnnnnnnnnnnnnnnnnnnnnnnnnnnnnnnnnnnnnnnnnnnnnnnnnnnnnnnnnnnnnnnnnnnnnnnnnnnnnnnnnnnnnnnnnnnnnnnnnnnnnnnnnnnnnnnnnnnnnnnnnnnnnnnnnnnnnnnnnnnnnnnnnnnnnnnnnnnnnnnnnnnnnnnnnnnnnnnnnnnnnnnnnnnnnnnnnnnnnnnnnnnnnnnnnnnnnnnnnnnnnnnnnnnnnnnnnnnnnnnnnnnnnnnnnnnnnnnnnnnnnnnnnnnnnnnnnnnnnnnnnnnnnnnnnnnnnnnnnnnnnnnnnnnnnnnnnnnnnnnnnnnnnnnnnnnnnnnnnnnnnnnnnnnnnnnnnnnnnnnnnnnnnnnnnnnnnnnnnnnnnnnnnnnnnnnnnnnnnnnnnnnnnnnnnnnnnnnnnnnnnnnnnnnnnnnnnnnnnnnnnnnnnnnnnnnnnnnnnnnnnnnnnnnnnnnnnnnnnnnnnnnnnnnnnnnnnnnnnnnnnnnnnnnnnnnnnnnnnnnnnnnnnnnnnnnnnnnnnnnnnnnnnnnnnnnnnnnnnnnnnnnnnnnnnnnnnnnnnnnnnnnnnnnnnnnnnnnnnnnnnnnnnnnnnnnnnnnnnnnnnnnnnnnnnnnnnnnnnnnnnnnnnnnnnnnnnnnnnnnnnnnnnnnnnnnnnnnnnnnnnnnnnnnnnnnnnnnnnnnnnnnnnnnnnnnnnnnnnnnnnnnnnnnnnnnnnnnnnnnnnnnnnnnnnnnnnnnnnnnnnnnnnnnnnnnnnnnnnnnnnnnnnnnnnnnnnnnnnnnnnnnnnnnnnnnnnnnnnnnnnnnnnnnnnnnnnnnnnnnnnnnnnnnnnnnnnnnnnnnnnnnnnnnnnnnnnnnnnnnnnnnnnnnnnnnnnnnnnnnnnnnnnnnnnnnnnnnnnnnnnnnnnnnnnnnnnnnnnnnnnnnnnnnnnnnnnnnnnnnnnnnnnnnnnnnnnnnnnnnnnnnnnnnnnnnnnnnnnnnnnnnnnnnnnnnnnnnnnnnnnnnnnnnnnnnnnnnnnnnnnnnnnnnnnnnnnnnnnnnnnnnnnnnnnnnnnnnnnnnnnnnnnnnnnnnnnnnnnnnnnnnnnnnnnnnnnnnnnnnnnnnnnnnnnnnnnnnnnnnnnnnnnnnnnnnnnnnnnnnnnnnnnnnnnnnnnnnnnnnnnnnnnnnnnnnnnnnnnnnnnnnnnnnnnnnnnnnnnnnnnnnnnnnnnnnnnnnnnnnnnnnnnnnnnnnnnnnnnnnnnnnnnnnnnnnnnnnnnnnnnnnnnnnnnnnnnnnnnnnnnnnnnnnnnnnnnnnnnnnnnnnnnnnnnnnnnnnnnnnnnnnnnnnnnnnnnnnnnnnnnnnnnnnnnnnnnnnnnnnnnnnnnnnnnnnnnnnnnnnnnnnnnnnnnnnnnnnnnnnnnnnnnnnnnnnnnnnnnnnnnnnnnnnnnnnnnnnnnnnnnnnnnnnnnnnnnnnnnnnnnnnnnnnnnnnnnnnnnnnnnnnnnnnnnnnnnnnnnnnnnnnnnnnnnnnnnnnnnnnnnnnnnnnnnnnnnnnnnnnnnnnnnnnnnnnnnnnnnnnnnnnnnnnnnnnnnnnnnnnnnnnnnnnnnnnnnnnnnnnnnnnnnnnnnnnnnnnnnnnnnnnnnnnnnnnnnnnnnnnnnnnnnnnnnnnnnnnnnnnnnnnnnnnnnnnnnnnnnnnnnnnnnnnnnnnnnnnnnnnnnnnnnnnnnnnnnnnnnnnnnnnnnnnnnnnnnnnnnnnnnnnnnnnnnnnnnnnnnnnnnnnnnnnnnnnnnnnnnnnnnnnnnnnnnnnnnnnnnnnnnnnnnnnnnnnnnnnnnnnnnnnnnnnnnnnnnnnnnnnnnnnnnnnnnnnnnnnnnnnnnnnnnnnnnnnnnnnnnnnnnnnnnnnnnnnnnnnnnnnnnnnnnnnnnnnnnnnnnnnnnnnnnnnnnnnnnnnnnnnnnnnnnnnnnnnnnnnnnnnnnnnnnnnnnnnnnnnnnnnnnnnnnnnnnnnnnnnnnnnnnnnnnnnnnnnnnnnnnnnnnnnnnnnnnnnnnnnnnnnnnnnnnnnnnnnnnnnnnnnnnnnnnnnnnnnnnnnnnnnnnnnnnnnnnnnnnnnnnnnnnnnnnnnnnnnnnnnnnnnnnnnnnnnnnnnnnnnnnnnnnnnnnnnnnnnnnnnnnnnnnnnnnnnnnnnnnnnnnnnnnnnnnnnnnnnnnnnnnnnnnnnnnnnnnnnnnnnnnnnnnnnnnnnnnnnnnnnnnnnnnnnnnnnnnnnnnnnnnnnnnnnnnnnnnnnnnnnnnnnnnnnnnnnnnnnnnnnnnnnnnnnnnnnnnnnnnnnnnnnnnnnnnnnnnnnnnnnnnnnnnnnnnnnnnnnnnnnnnnnnnnnnnnnnnnnnnnnnnnnnnnnnnnnnnnnnnnnnnnnnnnnnnnnnnnnnnnnnnnnnnnnnnnnnnnnnnnnnnnnnnnnnnnnnnnnnnnnnnnnnnnnnnnnnnnnnnnnnnnnnnnnnnnnnnnnnnnnnnnnnnnnnnnnnnnnnnnnnnnnnnnnnnnnnnnnnnnnnnnnnnnnnnnnnnnnnnnnnnnnnnnnnnnnnnnnnnnnnnnnnnnnnnnnnnnnnnnnnnnnnnnnnnnnnnnnnnnnnnnnnnnnnnnnnnnnnnnnnnnnnnnnnnnnnnnnnnnnnnnnnnnnnnnnnnnnnnnnnnnnnnnnnnnnnnnnnnnnnnnnnnnnnnnnnnnnnnnnnnnnnnnnnnnnnnnnnnnnnnnnnnnnnnnnnnnnnnnnnnnnnnnnnnnnnnnnnnnnnnnnnnnnnnnnnnnnnnnnnnnnnnnnnnnnnnnnnnnnnnnnnnnnnnnnnnnnnnnnnnnnnnnnnnnnnnnnnnnnnnnnnnnnnnnnnnnnnnnnnnnnnnnnnnnnnnnnnnnnnnnnnnnnnnnnnnnnnnnnnnnnnnnnnnnnnnnnnnnnnnnnnnnnnnnnnnnnnnnnnnnnnnnnnnnnnnnnnnnnnnnnnnnnnnnnnnnnnnnnnnnnnnnnnnnnnnnnnnnnnnnnnnnnnnnnnnnnnnnnnnnnnnnnnnnnnnnnnnnnnnnnnnnnnnnnnnnnnnnnnnnnnnnnnnnnnnnnnnnnnnnnnnnnnnnnnnnnnnnnnnnnnnnnnnnnnnnnnnnnnnnnnnnnnnnnnnnnnnnnnnnnnnnnnnnnnnnnnnnnnnnnnnnnnnnnnnnnnnnnnnnnnnnnnnnnnnnnnnnnnnnnnnnnnnnnnnnnnnnnnnnnnnnnnnnnnnnnnnnnnnnnnnnnnnnnnnnnnnnnnnnnnnnnnnnnnnnnnnnnnnnnnnnnnnnnnnnnnnnnnnnnnnnnnnnnnnnnnnnnnnnnnnnnnnnnnnnnnnnnnnnnnnnnnnnnnnnnnnnnnnnnnnnnnnnnnnnnnnnnnnnnnnnnnnnnnnnnnnnnnnnnnnnnnnnnnnnnnnnnnnnnnnnnnnnnnnnnnnnnnnnnnnnnnnnnnnnnnnnnnnnnnnnnnnnnnnnnnnnnnnnnnnnnnnnnnnnnnnnnnnnnnnnnnnnnnnnnnnnnnnnnnnnnnnnnnnnnnnnnnnnnnnnnnnnnnnnnnnnnnnnnnnnnnnnnnnnnnnnnnnnnnnnnnnnnnnnnnnnnnnnnnnnnnnnnnnnnnnnnnnnnnnnnnnnnnnnnnnnnnnnnnnnnnnnnnnnnnnnnnnnnnnnnnnnnnnnnnnnnnnnnnnnnnnnnnnnnnnnnnnnnnnnnnnnnnnnnnnnnnnnnnnnnnnnnnnnnnnnnnnnnnnnnnnnnnnnnnnnnnnnnnnnnnnnnnnnnnnnnnnnnnnnnnnnnnnnnnnnnnnnnnnnnnnnnnnnnnnnnnnnnnnnnnnnnnnnnnnnnnnnnnnnnnnnnnnnnnnnnnnnnnnnnnnnnnnnnnnnnnnnnnnnnnnnnnnnnnnnnnnnnnnnnnnnnnnnnnnnnnnnnnnnnnnnnnnnnnnnnnnnnnnnnnnnnnnnnnnnnnnnnnnnnnnnnnnnnnnnnnnnnnnnnnnnnnnnnnnnnnnnnnnnnnnnnnnnnnnnnnnnnnnnnnnnnnnnnnnnnnnnnnnnnnnnnnnnnnnnnnnnnnnnnnnnnnnnnnnnnnnnnnnnnnnnnnnnnnnnnnnnnnnnnnnnnnnnnnnnnnnnnnnnnnnnnnnnnnnnnnnnnnnnnnnnnnnnnnnnnnnnnnnnnnnnnnnnnnnnnnnnnnnnnnnnnnnnnnnnnnnnnnnnnnnnnnnnnnnnnnnnnnnnnnnnnnnnnnnnnnnnnnnnnnnnnnnnnnnnnnnnnnnnnnnnnnnnnnnnnnnnnnnnnnnnnnnnnnnnnnnnnnnnnnnnnnnnnnnnnnnnnnnnnnnnnnnnnnnnnnnnnnnnnnnnnnnnnnnnnnnnnnnnnnnnnnnnnnnnnnnnnnnnnnnnnnnnnnnnnnnnnnnnnnnnnnnnnnnnnnnnnnnnnnnnnnnnnnnnnnnnnnnnnnnnnnnnnnnnnnnnnnnnnnnnnnnnnnnnnnnnnnnnnnnnnnnnnnnnnnnnnnnnnnnnnnnnnnnnnnnnnnnnnnnnnnnnnnnnnnnnnnnnnnnnnnnnnnnnnnnnnnnnnnnnnnnnnnnnnnnnnnnnnnnnnnnnnnnnnnnnnnnnnnnnnnnnnnnnnnnnnnnnnnnnnnnnnnnnnnnnnnnnnnnnnnnnnnnnnnnnnnnnnnnnnnnnnnnnnnnnnnnnnnnnnnnnnnnnnnnnnnnnnnnnnnnnnnnnnnnnnnnnnnnnnnnnnnnnnnnnnnnnnnnnnnnnnnnnnnnnnnnnnnnnnnnnnnnnnnnnnnnnnnnnnnnnnnnnnnnnnnnnnnnnnnnnnnnnnnnnnnnnnnnnnnnnnnnnnnnnnnnnnnnnnnnnnnnnnnnnnnnnnnnnnnnnnnnnnnnnnnnnnnnnnnnnnnnnnnnnnnnnnnnnnnnnnnnnnnnnnnnnnnnnnnnnnnnnnnnnnnnnnnnnnnnnnnnnnnnnnnnnnnnnnnnnnnnnnnnnnnnnnnnnnnnnnnnnnnnnnnnnnnnnnnnnnnnnnnnnnnnnnnnnnnnnnnnnnnnnnnnnnnnnnnnnnnnnnnnnnnnnnnnnnnnnnnnnnnnnnnnnnnnnnnnnnnnnnnnnnnnnnnnnnnnnnnnnnnnnnnnnnnnnnnnnnnnnnnnnnnnnnnnnnnnnnnnnnnnnnnnnnnnnnnnnnnnnnnnnnnnnnnnnnnnnnnnnnnnnnnnnnnnnnnnnnnnnnnnnnnnnnnnnnnnnnnnnnnnnnnnnnnnnnnnnnnnnnnnnnnnnnnnnnnnnnnnnnnnnnnnnnnnnnnnnnnnnnnnnnnnnnnnnnnnnnnnnnnnnnnnnnnnnnnnnnnnnnnnnnnnnnnnnnnnnnnnnnnnnnnnnnnnnnnnnnnnnnnnnnnnnnnnnnnnnnnnnnnnnnnnnnnnnnnnnnnnnnnnnnnnnnnnnnnnnnnnnnnnnnnnnnnnnnnnnnnnnnnnnnnnnnnnnnnnnnnnnnnnnnnnnnnnnnnnnnnnnnnnnnnnnnnnnnnnnnnnnnnnnnnnnnnnnnnnnnnnnnnnnnnnnnnnnnnnnnnnnnnnnnnnnnnnnnnnnnnnnnnnnnnnnnnnnnnnnnnnnnnnnnnnnnnnnnnnnnnnnnnnnnnnnnnnnnnnnnnnnnnnnnnnnnnnnnnnnnnnnnnnnnnnnnnnnnnnnnnnnnnnnnnnnnnnnnnnnnnnnnnnnnnnnnnnnnnnnnnnnnnnnnnnnnnnnnnnnnnnnnnnnnnnnnnnnnnnnnnnnnnnnnnnnnnnnnnnnnnnnnnnnnnnnnnnnnnnnnnnnnnnnnnnnnnnnnnnnnnnnnnnnnnnnnnnnnnnnnnnnnnnnnnnnnnnnnnnnnnnnnnnnnnnnnnnnnnnnnnnnnnnnnnnnnnnnnnnnnnnnnnnnnnnnnnnnnnnnnnnnnnnnnnnnnnnnnnnnnnnnnnnnnnnnnnnnnnnnnnnnnnnnnnnnnnnnnnnnnnnnnnnnnnnnnnnnnnnnnnnnnnnnnnnnnnnnnnnnnnnnnnnnnnnnnnnnnnnnnnnnnnnnnnnnnnnnnnnnnnnnnnnnnnnnnnnnnnnnnnnnnnnnnnnnnnnnnnnnnnnnnnnnnnnnnnnnnnnnnnnnnnnnnnnnnnnnnnnnnnnnnnnnnnnnnnnnnnnnnnnnnnnnnnnnnnnnnnnnnnnnnnnnnnnnnnnnnnnnnnnnnnnnnnnnnnnnnnnnnnnnnnnnnnnnnnnnnnnnnnnnnnnnnnnnnnnnnnnnnnnnnnnnnnnnnnnnnnnnnnnnnnnnnnnnnnnnnnnnnnnnnnnnnnnnnnnnnnnnnnnnnnnnnnnnnnnnnnnnnnnnnnnnnnnnnnnnnnnnnnnnnnnnnnnnnnnnnnnnnnnnnnnnnnnnnnnnnnnnnnnnnnnnnnnnnnnnnnnnnnnnnnnnnnnnnnnnnnnnnnnnnnnnnnnnnnnnnnnnnnnnnnnnnnnnnnnnnnnnnnnnnnnnnnnnnnnnnnnnnnnnnnnnnnnnnnnnnnnnnnnnnnnnnnnnnnnnnnnnnnnnnnnnnnnnnnnnnnnnnnnnnnnnnnnnnnnnnnnnnnnnnnnnnnnnnnnnnnnnnnnnnnnnnnnnnnnnnnnnnnnnnnnnnnnnnnnnnnnnnnnnnnnnnnnnnnnnnnnnnnnnnnnnnnnnnnnnnnnnnnnnnnnnnnnnnnnnnnnnnnnnnnnnnnnnnnnnnnnnnnnnnnnnnnnnnnnnnnnnnnnnnnnnnnnnnnnnnnnnnnnnnnnnnnnnnnnnnnnnnnnnnnnnnnnnnnnnnnnnnnnnnnnnnnnnnnnnnnnnnnnnnnnnnnnnnnnnnnnnnnnnnnnnnnnnnnnnnnnnnnnnnnnnnnnnnnnnnnnnnnnnnnnnnnnnnnnnnnnnnnnnnnnnnnnnnnnnnnnnnnnnnnnnnnnnnnnnnnnnnnnnnnnnnnnnnnnnnnnnnnnnnnnnnnnnnnnnnnnnnnnnnnnnnnnnnnnnnnnnnnnnnnnnnnnnnnnnnnnnnnnnnnnnnnnnnnnnnnnnnnnnnnnnnnnnnnnnnnnnnnnnnnnnnnnnnnnnnnnnnnnnnnnnnnnnnnnnnnnnnnnnnnnnnnnnnnnnnnnnnnnnnnnnnnnnnnnnnnnnnnnnnnnnnnnnnnnnnnnnnnnnnnnnnnnnnnnnnnnnnnnnnnnnnnnnnnnnnnnnnnnnnnnnnnnnnnnnnnnnnnnnnnnnnnnnnnnnnnnnnnnnnnnnnnnnnnnnnnnnnnnnnnnnnnnnnnnnnnnnnnnnnnnnnnnnnnnnnnnnnnnnnnnnnnnnnnnnnnnnnnnnnnnnnnnnnnnnnnnnnnnnnnnnnnnnnnnnnnnnnnnnnnnnnnnnnnnnnnnnnnnnnnnnnnnnnnnnnnnnnnnnnnnnnnnnnnnnnnnnnnnnnnnnnnnnnnnnnnnnnnnnnnnnnnnnnnnnnnnnnnnnnnnnnnnnnnnnnnnnnnnnnnnnnnnnnnnnnnnnnnnnnnnnnnnnnnnnnnnnnnnnnnnnnnnnnnnnnnnnnnnnnnnnnnnnnnnnnnnnnnnnnnnnnnnnnnnnnnnnnnnnnnnnnnnnnnnnnnnnnnnnnnnnnnnnnnnnnnnnnnnnnnnnnnnnnnnnnnnnnnnnnnnnnnnnnnnnnnnnnnnnnnnnnnnnnnnnnnnnnnnnnnnnnnnnnnnnnnnnnnnnnnnnnnnnnnnnnnnnnnnnnnnnnnnnnnnnnnnnnnnnnnnnnnnnnnnnnnnnnnnnnnnnnnnnnnnnnnnnnnnnnnnnnnnnnnnnnnnnnnnnnnnnnnnnnnnnnnnnnnnnnnnnnnnnnnnnnnnnnnnnnnnnnnnnnnnnnnnnnnnnnnnnnnnnnnnnnnnnnnnnnnnnnnnnnnnnnnnnnnnnnnnnnnnnnnnnnnnnnnnnnnnnnnnnnnnnnnnnnnnnnnnnnnnnnnnnnnnnnnnnnnnnnnnnnnnnnnnnnnnnnnnnnnnnnnnnnnnnnnnnnnnnnnnnnnnnnnnnnnnnnnnnnnnnnnnnnnnnnnnnnnnnnnnnnnnnnnnnnnnnnnnnnnnnnnnnnnnnnnnnnnnnnnnnnnnnnnnnnnnnnnnnnnnnnnnnnnnnnnnnnnnnnnnnnnnnnnnnnnnnnnnnnnnnnnnnnnnnnnnnnnnnnnnnnnnnnnnnnnnnnnnnnnnnnnnnnnnnnnnnnnnnnnnnnnnnnnnnnnnnnnnnnnnnnnnnnnnnnnnnnnnnnnnnnnnnnnnnnnnnnnnnnnnnnnnnnnnnnnnnnnnnnnnnnnnnnnnnnnnnnnnnnnnnnnnnnnnnnnnnnnnnnnnnnnnnnnnnnnnnnnnnnnnnnnnnnnnnnnnnnnnnnnnnnnnnnnnnnnnnnnnnnnnnnnnnnnnnnnnnnnnnnnnnnnnnnnnnnnnnnnnnnnnnnnnnnnnnnnnnnnnnnnnnnnnnnnnnnnnnnnnnnnnnnnnnnnnnnnnnnnnnnnnnnnnnnnnnnnnnnnnnnnnnnnnnnnnnnnnnnnnnnnnnnnnnnnnnnnnnnnnnnnnnnnnnnnnnnnnnnnnnnnnnnnnnnnnnnnnnnnnnnnnnnnnnnnnnnnnnnnnnnnnnnnnnnnnnnnnnnnnnnnnnnnnnnnnnnnnnnnnnnnnnnnnnnnnnnnnnnnnnnnnnnnnnnnnnnnnnnnnnnnnnnnnnnnnnnnnnnnnnnnnnnnnnnnnnnnnnnnnnnnnnnnnnnnnnnnnnnnnnnnnnnnnnnnnnnnnnnnnnnnnnnnnnnnnnnnnnnnnnnnnnnnnnnnnnnnnnnnnnnnnnnnnnnnnnnnnnnnnnnnnnnnnnnnnnnnnnnnnnnnnnnnnnnnnnnnnnnnnnnnnnnnnnnnnnnnnnnnnnnnnnnnnnnnnnnnnnnnnnnnnnnnnnnnnnnnnnnnnnnnnnnnnnnnnnnnnnnnnnnnnnnnnnnnnnnnnnnnnnnnnnnnnnnnnnnnnnnnnnnnnnnnnnnnnnnnnnnnnnnnnnnnnnnnnnnnnnnnnnnnnnnnnnnnnnnnnnnnnnnnnnnnnnnnnnnnnnnnnnnnnnnnnnnnnnnnnnnnnnnnnnnnnnnnnnnnnnnnnnnnnnnnnnnnnnnnnnnnnnnnnnnnnnnnnnnnnnnnnnnnnnnnnnnnnnnnnnnnnnnnnnnnnnnnnnnnnnnnnnnnnnnnnnnnnnnnnnnnnnnnnnnnnnnnnnnnnnnnnnnnnnnnnnnnnnnnnnnnnnnnnnnnnnnnnnnnnnnnnnnnnnnnnnnnnnnnnnnnnnnnnnnnnnnnnnnnnnnnnnnnnnnnnnnnnnnnnnnnnnnnnnnnnnnnnnnnnnnnnnnnnnnnnnnnnnnnnnnnnnnnnnnnnnnnnnnnnnnnnnnnnnnnnnnnnnnnnnnnnnnnnnnnnnnnnnnnnnnnnnnnnnnnnnnnnnnnnnnnnnnnnnnnnnnnnnnnnnnnnnnnnnnnnnnnnnnnnnnnnnnnnnnnnnnnnnnnnnnnnnnnnnnnnnnnnnnnnnnnnnnnnnnnnnnnnnnnnnnnnnnnnnnnnnnnnnnnnnnnnnnnnnnnnnnnnnnnnnnnnnnnnnnnnnnnnnnnnnnnnnnnnnnnnnnnnnnnnnnnnnnnnnnnnnnnnnnnnnnnnnnnnnnnnnnnnnnnnnnnnnnnnnnnnnnnnnnnnnnnnnnnnnnnnnnnnnnnnnnnnnnnnnnnnnnnnnnnnnnnnnnnnnnnnnnnnnnnnnnnnnnnnnnnnnnnnnnnnnnnnnnnnnnnnnnnnnnnnnnnnnnnnnnnnnnnnnnnnnnnnnnnnnnnnnnnnnnnnnnnnnnnnnnnnnnnnnnnnnnnnnnnnnnnnnnnnnnnnnnnnnnnnnnnnnnnnnnnnnnnnnnnnnnnnnnnnnnnnnnnnnnnnnnnnnnnnnnnnnnnnnnnnnnnnnnnnnnnnnnnnnnnnnnnnnnnnnnnnnnnnnnnnnnnnnnnnnnnnnnnnnnnnnnnnnnnnnnnnnnnnnnnnnnnnnnnnnnnnnnnnnnnnnnnnnnnnnnnnnnnnnnnnnnnnnnnnnnnnnnnnnnnnnnnnnnnnnnnnnnnnnnnnnnnnnnnnnnnnnnnnnnnnnnnnnnnnnnnnnnnnnnnnnnnnnnnnnnnnnnnnnnnnnnnnnnnnnnnnnnnnnnnnnnnnnnnnnnnnnnnnnnnnnnnnnnnnnnnnnnnnnnnnnnnnnnnnnnnnnnnnnnnnnnnnnnnnnnnnnnnnnnnnnnnnnnnnnnnnnnnnnnnnnnnnnnnnnnnnnnnnnnnnnnnnnnnnnnnnnnnnnnnnnnnnnnnnnnnnnnnnnnnnnnnnnnnnnnnnnnnnnnnnnnnnnnnnnnnnnnnnnnnnnnnnnnnnnnnnnnnnnnnnnnnnnnnnnnnnnnnnnnnnnnnnnnnnnnnnnnnnnnnnnnnnnnnnnnnnnnnnnnnnnnnnnnnnnnnnnnnnnnnnnnnnnnnnnnnnnnnnnnnnnnnnnnnnnnnnnnnnnnnnnnnnnnnnnnnnnnnnnnnnnnnnnnnnnnnnnnnnnnnnnnnnnnnnnnnnnnnnnnnnnnnnnnnnnnnnnnnnnnnnnnnnnnnnnnnnnnnnnnnnnnnnnnnnnnnnnnnnnnnnnnnnnnnnnnnnnnnnnnnnnnnnnnnnnnnnnnnnnnnnnnnnnnnnnnnnnnnnnnnnnnnnnnnnnnnnnnnnnnnnnnnnnnnnnnnnnnnnnnnnnnnnnnnnnnnnnnnnnnnnnnnnnnnnnnnnnnnnnnnnnnnnnnnnnnnnnnnnnnnnnnnnnnnnnnnnnnnnnnnnnnnnnnnnnnnnnnnnnnnnnnnnnnnnnnnnnnnnnnnnnnnnnnnnnnnnnnnnnnnnnnnnnnnnnnnnnnnnnnnnnnnnnnnnnnnnnnnnnnnnnnnnnnnnnnnnnnnnnnnnnnnnnnnnnnnnnnnnnnnnnnnnnnnnnnnnnnnnnnnnnnnnnnnnnnnnnnnnnnnnnnnnnnnnnnnnnnnnnnnnnnnnnnnnnnnnnnnnnnnnnnnnnnnnnnnnnnnnnnnnnnnnnnnnnnnnnnnnnnnnnnnnnnnnnnnnnnnnnnnnnnnnnnnnnnnnnnnnnnnnnnnnnnnnnnnnnnnnnnnnnnnnnnnnnnnnnnnnnnnnnnnnnnnnnnnnnnnnnnnnnnnnnnnnnnnnnnnnnnnnnnnnnnnnnnnnnnnnnnnnnnnnnnnnnnnnnnnnnnnnnnnnnnnnnnnnnnnnnnnnnnnnnnnnnnnnnnnnnnnnnnnnnnnnnnnnnnnnnnnnnnnnnnnnnnnnnnnnnnnnnnnnnnnnnnnnnnnnnnnnnnnnnnnnnnnnnnnnnnnnnnnnnnnnnnnnnnnnnnnnnnnnnnnnnnnnnnnnnnnnnnnnnnnnnnnnnnnnnnnnnnnnnnnnnnnnnnnnnnnnnnnnnnnnnnnnnnnnnnnnnnnnnnnnnnnnnnnnnnnnnnnnnnnnnnnnnnnnnnnnnnnnnnnnnnnnnnnnnnnnnnnnnnnnnnnnnnnnnnnnnnnnnnnnnnnnnnnnnnnnnnnnnnnnnnnnnnnnnnnnnnnnnnnnnnnnnnnnnnnnnnnnnnnnnnnnnnnnnnnnnnnnnnnnnnnnnnnnnnnnnnnnnnnnnnnnnnnnnnnnnnnnnnnnnnnnnnnnnnnnnnnnnnnnnnnnnnnnnnnnnnnnnnnnnnnnnnnnnnnnnnnnnnnnnnnnnnnnnnnnnnnnnnnnnnnnnnnnnnnnnnnnnnnnnnnnnnnnnnnnnnnnnnnnnnnnnnnnnnnnnnnnnnnnnnnnnnnnnnnnnnnnnnnnnnnnnnnnnnnnnnnnnnnnnnnnnnnnnnnnnnnnnnnnnnnnnnnnnnnnnnnnnnnnnnnnnnnnnnnnnnnnnnnnnnnnnnnnnnnnnnnnnnnnnnnnnnnnnnnnnnnnnnnnnnnnnnnnnnnnnnnnnnnnnnnnnnnnnnnnnnnnnnnnnnnnnnnnnnnnnnnnnnnnnnnnnnnnnnnnnnnnnnnnnnnnnnnnnnnnnnnnnnnnnnnnnnnnnnnnnnnnnnnnnnnnnnnnnnnnnnnnnnnnnnnnnnnnnnnnnnnnnnnnnnnnnnnnnnnnnnnnnnnnnnnnnnnnnnnnnnnnnnnnnnnnnnnnnnnnnnnnnnnnnnnnnnnnnnnnnnnnnnnnnnnnnnnnnnnnnnnnnnnnnnnnnnnnnnnnnnnnnnnnnnnnnnnnnnnnnnnnnnnnnnnnnnnnnnnnnnnnnnnnnnnnnnnnnnnnnnnnnnnnnnnnnnnnnnnnnnnnnnnnnnnnnnnnnnnnnnnnnnnnnnnnnnnnnnnnnnnnnnnnnnnnnnnnnnnnnnnnnnnnnnnnnnnnnnnnnnnnnnnnnnnnnnnnnnnnnnnnnnnnnnnnnnnnnnnnnnnnnnnnnnnnnnnnnnnnnnnnnnnnnnnnnnnnnnnnnnnnnnnnnnnnnnnnnnnnnnnnnnnnnnnnnnnnnnnnnnnnnnnnnnnnnnnnnnnnnnnnnnnnnnnnnnnnnnnnnnnnnnnnnnnnnnnnnnnnnnnnnnnnnnnnnnnnnnnnnnnnnnnnnnnnnnnnnnnnnnnnnnnnnnnnnnnnnnnnnnnnnnnnnnnnnnnnnnnnnnnnnnnnnnnnnnnnnnnnnnnnnnnnnnnnnnnnnnnnnnnnnnnnnnnnnnnnnnnnnnnnnnnnnnnnnnnnnnnnnnnnnnnnnnnnnnnnnnnnnnnnnnnnnnnnnnnnnnnnnnnnnnnnnnnnnnnnnnnnnnnnnnnnnnnnnnnnnnnnnnnnnnnnnnnnnnnnnnnnnnnnnnnnnnnnnnnnnnnnnnnnnnnnnnnnnnnnnnnnnnnnnnnnnnnnnnnnnnnnnnnnnnnnnnnnnnnnnnnnnnnnnnnnnnnnnnnnnnnnnnnnnnnnnnnnnnnnnnnnnnnnnnnnnnnnnnnnnnnnnnnnnnnnnnnnnnnnnnnnnnnnnnnnnnnnnnnnnnnnnnnnnnnnnnnnnnnnnnnnnnnnnnnnnnnnnnnnnnnnnnnnnnnnnnnnnnnnnnnnnnnnnnnnnnnnnnnnnnnnnnnnnnnnnnnnnnnnnnnnnnnnnnnnnnnnnnnnnnnnnnnnnnnnnnnnnnnnnnnnnnnnnnnnnnnnnnnnnnnnnnnnnnnnnnnnnnnnnnnnnnnnnnnnnnnnnnnnnnnnnnnnnnnnnnnnnnnnnnnnnnnnnnnnnnnnnnnnnnnnnnnnnnnnnnnnnnnnnnnnnnnnnnnnnnnnnnnnnnnnnnnnnnnnnnnnnnnnnnnnnnnnnnnnnnnnnnnnnnnnnnnnnnnnnnnnnnnnnnnnnnnnnnnnnnnnnnnnnnnnnnnnnnnnnnnnnnnnnnnnnnnnnnnnnnnnnnnnnnnnnnnnnnnnnnnnnnnnnnnnnnnnnnnnnnnnnnnnnnnnnnnnnnnnnnnnnnnnnnnnnnnnnnnnnnnnnnnnnnnnnnnnnnnnnnnnnnnnnnnnnnnnnnnnnnnnnnnnnnnnnnnnnnnnnnnnnnnnnnnnnnnnnnnnnnnnnnnnnnnnnnnnnnnnnnnnnnnnnnnnnnnnnnnnnnnnnnnnnnnnnnnnnnnnnnnnnnnnnnnnnnnnnnnnnnnnnnnnnnnnnnnnnnnnnnnnnnnnnnnnnnnnnnnnnnnnnnnnnnnnnnnnnnnnnnnnnnnnnnnnnnnnnnnnnnnnnnnnnnnnnnnnnnnnnnnnnnnnnnnnnnnnnnnnnnnnnnnnnnnnnnnnnnnnnnnnnnnnnnnnnnnnnnnnnnnnnnnnnnnnnnnnnnnnnnnnnnnnnnnnnnnnnnnnnnnnnnnnnnnnnnnnnnnnnnnnnnnnnnnnnnnnnnnnnnnnnnnnnnnnnnnnnnnnnnnnnnnnnnnnnnnnnnnnnnnnnnnnnnnnnnnnnnnnnnnnnnnnnnnnnnnnnnnnnnnnnnnnnnnnnnnnnnnnnnnnnnnnnnnnnnnnnnnnnnnnnnnnnnnnnnnnnnnnnnnnnnnnnnnnnnnnnnnnnnnnnnnnnnnnnnnnnnnnnnnnnnnnnnnnnnnnnnnnnnnnnnnnnnnnnnnnnnnnnnnnnnnnnnnnnnnnnnnnnnnnnnnnnnnnnnnnnnnnnnnnnnnnnnnnnnnnnnnnnnnnnnnnnnnnnnnnnnnnnnnnnnnnnnnnnnnnnnnnnnnnnnnnnnnnnnnnnnnnnnnnnnnnnnnnnnnnnnnnnnnnnnnnnnnnnnnnnnnnnnnnnnnnnnnnnnnnnnnnnnnnnnnnnnnnnnnnnnnnnnnnnnnnnnnnnnnnnnnnnnnnnnnnnnnnnnnnnnnnnnnnnnnnnnnnnnnnnnnnnnnnnnnnnnnnnnnnnnnnnnnnnnnnnnnnnnnnnnnnnnnnnnnnnnnnnnnnnnnnnnnnnnnnnnnnnnnnnnnnnnnnnnnnnnnnnnnnnnnnnnnnnnnnnnnnnnnnnnnnnnnnnnnnnnnnnnnnnnnnnnnnnnnnnnnnnnnnnnnnnnnnnnnnnnnnnnnnnnnnnnnnnnnnnnnnnnnnnnnnnnnnnnnnnnnnnnnnnnnnnnnnnnnnnnnnnnnnnnnnnnnnnnnnnnnnnnnnnnnnnnnnnnnnnnnnnnnnnnnnnnnnnnnnnnnnnnnnnnnnnnnnnnnnnnnnnnnnnnnnnnnnnnnnnnnnnnnnnnnnnnnnnnnnnnnnnnnnnnnnnnnnnnnnnnnnnnnnnnnnnnnnnnnnnnnnnnnnnnnnnnnnnnnnnnnnnnnnnnnnnnnnnnnnnnnnnnnnnnnnnnnnnnnnnnnnnnnnnnnnnnnnnnnnnnnnnnnnnnnnnnnnnnnnnnnnnnnnnnnnnnnnnnnnnnnnnnnnnnnnnnnnnnnnnnnnnnnnnnnnnnnnnnnnnnnnnnnnnnnnnnnnnnnnnnnnnnnnnnnnnnnnnnnnnnnnnnnnnnnnnnnnnnnnnnnnnnnnnnnnnnnnnnnnnnnnnnnnnnnnnnnnnnnnnnnnnnnnnnnnnnnnnnnnnnnnnnnnnnnnnnnnnnnnnnnnnnnnnnnnnnnnnnnnnnnnnnnnnnnnnnnnnnnnnnnnnnnnnnnnnnnnnnnnnnnnnnnnnnnnnnnnnnnnnnnnnnnnnnnnnnnnnnnnnnnnnnnnnnnnnnnnnnnnnnnnnnnnnnnnnnnnnnnnnnnnnnnnnnnnnnnnnnnnnnnnnnnnnnnnnnnnnnnnnnnnnnnnnnnnnnnnnnnnnnnnnnnnnnnnnnnnnnnnnnnnnnnnnnnnnnnnnnnnnnnnnnnnnnnnnnnnnnnnnnnnnnnnnnnnnnnnnnnnnnnnnnnnnnnnnnnnnnnnnnnnnnnnnnnnnnnnnnnnnnnnnnnnnnnnnnnnnnnnnnnnnnnnnnnnnnnnnnnnnnnnnnnnnnnnnnnnnnnnnnnnnnnnnnnnnnnnnnnnnnnnnnnnnnnnnnnnnnnnnnnnnnnnnnnnnnnnnnnnnnnnnnnnnnnnnnnnnnnnnnnnnnnnnnnnnnnnnnnnnnnnnnnnnnnnnnnnnnnnnnnnnnnnnnnnnnnnnnnnnnnnnnnnnnnnnnnnnnnnnnnnnnnnnnnnnnnnnnnnnnnnnnnnnnnnnnnnnnnnnnnnnnnnnnnnnnnnnnnnnnnnnnnnnnnnnnnnnnnnnnnnnnnnnnnnnnnnnnnnnnnnnnnnnnnnnnnnnnnnnnnnnnnnnnnnnnnnnnnnnnnnnnnnnnnnnnnnnnnnnnnnnnnnnnnnnnnnnnnnnnnnnnnnnnnnnnnnnnnnnnnnnnnnnnnnnnnnnnnnnnnnnnnnnnnnnnnnnnnnnnnnnnnnnnnnnnnnnnnnnnnnnnnnnnnnnnnnnnnnnnnnnnnnnnnnnnnnnnnnnnnnnnnnnnnnnnnnnnnnnnnnnnnnnnnnnnnnnnnnnnnnnnnnnnnnnnnnnnnnnnnnnnnnnnnnnnnnnnnnnnnnnnnnnnnnnnnnnnnnnnnnnnnnnnnnnnnnnnnnnnnnnnnnnnnnnnnnnnnnnnnnnnnnnnnnnnnnnnnnnnnnnnnnnnnnnnnnnnnnnnnnnnnnnnnnnnnnnnnnnnnnnnnnnnnnnnnnnnnnnnnnnnnnnnnnnnnnnnnnnnnnnnnnnnnnnnnnnnnnnnnnnnnnnnnnnnnnnnnnnnnnnnnnnnnnnnnnnnnnnnnnnnnnnnnnnnnnnnnnnnnnnnnnnnnnnnnnnnnnnnnnnnnnnnnnnnnnnnnnnnnnnnnnnnnnnnnnnnnnnnnnnnnnnnnnnnnnnnnnnnnnnnnnnnnnnnnnnnnnnnnnnnnnnnnnnnnnnnnnnnnnnnnnnnnnnnnnnnnnnnnnnnnnnnnnnnnnnnnnnnnnnnnnnnnnnnnnnnnnnnnnnnnnnnnnnnnnnnnnnnnnnnnnnnnnnnnnnnnnnnnnnnnnnnnnnnnnnnnnnnnnnnnnnnnnnnnnnnnnnnnnnnnnnnnnnnnnnnnnnnnnnnnnnnnnnnnnnnnnnnnnnnnnnnnnnnnnnnnnnnnnnnnnnnnnnnnnnnnnnnnnnnnnnnnnnnnnnnnnnnnnnnnnnnnnnnnnnnnnnnnnnnnnnnnnnnnnnnnnnnnnnnnnnnnnnnnnnnnnnnnnnnnnnnnnnnnnnnnnnnnnnnnnnnnnnnnnnnnnnnnnnnnnnnnnnnnnnnnnnnnnnnnnnnnnnnnnnnnnnnnnnnnnnnnnnnnnnnnnnnnnnnnnnnnnnnnnnnnnnnnnnnnnnnnnnnnnnnnnnnnnnnnnnnnnnnnnnnnnnnnnnnnnnnnnnnnnnnnnnnnnnnnnnnnnnnnnnnnnnnnnnnnnnnnnnnnnnnnnnnnnnnnnnnnnnnnnnnnnnnnnnnnnnnnnnnnnnnnnnnnnnnnnnnnnnnnnnnnnnnnnnnnnnnnnnnnnnnnnnnnnnnnnnnnnnnnnnnnnnnnnnnnnnnnnnnnnnnnnnnnnnnnnnnnnnnnnnnnnnnnnnnnnnnnnnnnnnnnnnnnnnnnnnnnnnnnnnnnnnnnnnnnnnnnnnnnnnnnnnnnnnnnnnnnnnnnnnnnnnnnnnnnnnnnnnnnnnnnnnnnnnnnnnnnnnnnnnnnnnnnnnnnnnnnnnnnnnnnnnnnnnnnnnnnnnnnnnnnnnnnnnnnnnnnnnnnnnnnnnnnnnnnnnnnnnnnnnnnnnnnnnnnnnnnnnnnnnnnnnnnnnnnnnnnnnnnnnnnnnnnnnnnnnnnnnnnnnnnnnnnnnnnnnnnnnnnnnnnnnnnnnnnnnnnnnnnnnnnnnnnnnnnnnnnnnnnnnnnnnnnnnnnnnnnnnnnnnnnnnnnnnnnnnnnnnnnnnnnnnnnnnnnnnnnnnnnnnnnnnnnnnnnnnnnnnnnnnnnnnnnnnnnnnnnnnnnnnnnnnnnnnnnnnnnnnnnnnnnnnnnnnnnnnnnnnnnnnnnnnnnnnnnnnnnnnnnnnnnnnnnnnnnnnnnnnnnnnnnnnnnnnnnnnnnnnnnnnnnnnnnnnnnnnnnnnnnnnnnnnnnnnnnnnnnnnnnnnnnnnnnnnnnnnnnnnnnnnnnnnnnnnnnnnnnnnnnnnnnnnnnnnnnnnnnnnnnnnnnnnnnnnnnnnnnnnnnnnnnnnnnnnnnnnnnnnnnnnnnnnnnnnnnnnnnnnnnnnnnnnnnnnnnnnnnnnnnnnnnnnnnnnnnnnnnnnnnnnnnnnnnnnnnnnnnnnnnnnnnnnnnnnnnnnnnnnnnnnnnnnnnnnnnnnnnnnnnnnnnnnnnnnnnnnnnnnnnnnnnnnnnnnnnnnnnnnnnnnnnnnnnnnnnnnnnnnnnnnnnnnnnnnnnnnnnnnnnnnnnnnnnnnnnnnnnnnnnnnnnnnnnnnnnnnnnnnnnnnnnnnnnnnnnnnnnnnnnnnnnnnnnnnnnnnnnnnnnnnnnnnnnnnnnnnnnnnnnnnnnnnnnnnnnnnnnnnnnnnnnnnnnnnnnnnnnnnnnnnnnnnnnnnnnnnnnnnnnnnnnnnnnnnnnnnnnnnnnnnnnnnnnnnnnnnnnnnnnnnnnnnnnnnnnnnnnnnnnnnnnnnnnnnnnnnnnnnnnnnnnnnnnnnnnnnnnnnnnnnnnnnnnnnnnnnnnnnnnnnnnnnnnnnnnnnnnnnnnnnnnnnnnnnnnnnnnnnnnnnnnnnnnnnnnnnnnnnnnnnnnnnnnnnnnnnnnnnnnnnnnnnnnnnnnnnnnnnnnnnnnnnnnnnnnnnnnnnnnnnnnnnnnnnnnnnnnnnnnnnnnnnnnnnnnnnnnnnnnnnnnnnnnnnnnnnnnnnnnnnnnnnnnnnnnnnnnnnnnnnnnnnnnnnnnnnnnnnnnnnnnnnnnnnnnnnnnnnnnnnnnnnnnnnnnnnnnnnnnnnnnnnnnnnnnnnnnnnnnnnnnnnnnnnnnnnnnnnnnnnnnnnnnnnnnnnnnnnnnnnnnnnnnnnnnnnnnnnnnnnnnnnnnnnnnnnnnnnnnnnnnnnnnnnnnnnnnnnnnnnnnnnnnnnnnnnnnnnnnnnnnnnnnnnnnnnnnnnnnnnnnnnnnnnnnnnnnnnnnnnnnnnnnnnnnnnnnnnnnnnnnnnnnnnnnnnnnnnnnnnnnnnnnnnnnnnnnnnnnnnnnnnnnnnnnnnnnnnnnnnnnnnnnnnnnnnnnnnnnnnnnnnnnnnnnnnnnnnnnnnnnnnnnnnnnnnnnnnnnnnnnnnnnnnnnnnnnnnnnnnnnnnnnnnnnnnnnnnnnnnnnnnnnnnnnnnnnnnnnnnnnnnnnnnnnnnnnnnnnnnnnnnnnnnnnnnnnnnnnnnnnnnnnnnnnnnnnnnnnnnnnnnnnnnnnnnnnnnnnnnnnnnnnnnnnnnnnnnnnnnnnnnnnnnnnnnnnnnnnnnnnnnnnnnnnnnnnnnnnnnnnnnnnnnnnnnnnnnnnnnnnnnnnnnnnnnnnnnnnnnnnnnnnnnnnnnnnnnnnnnnnnnnnnnnnnnnnnnnnnnnnnnnnnnnnnnnnnnnnnnnnnnnnnnnnnnnnnnnnnnnnnnnnnnnnnnnnnnnnnnnnnnnnnnnnnnnnnnnnnnnnnnnnnnnnnnnnnnnnnnnnnnnnnnnnnnnnnnnnnnnnnnnnnnnnnnnnnnnnnnnnnnnnnnnnnnnnnnnnnnnnnnnnnnnnnnnnnnnnnnnnnnnnnnnnnnnnnnnnnnnnnnnnnnnnnnnnnnnnnnnnnnnnnnnnnnnnnnnnnnnnnnnnnnnnnnnnnnnnnnnnnnnnnnnnnnnnnnnnnnnnnnnnnnnnnnnnnnnnnnnnnnnnnnnnnnnnnnnnnnnnnnnnnnnnnnnnnnnnnnnnnnnnnnnnnnnnnnnnnnnnnnnnnnnnnnnnnnnnnnnnnnnnnnnnnnnnnnnnnnnnnnnnnnnnnnnnnnnnnnnnnnnnnnnnnnnnnnnnnnnnnnnnnnnnnnnnnnnnnnnnnnnnnnnnnnnnnnnnnnnnnnnnnnnnnnnnnnnnnnnnnnnnnnnnnnnnnnnnnnnnnnnnnnnnnnnnnnnnnnnnnnnnnnnnnnnnnnnnnnnnnnnnnnnnnnnnnnnnnnnnnnnnnnnnnnnnnnnnnnnnnnnnnnnnnnnnnnnnnnnnnnnnnnnnnnnnnnnnnnnnnnnnnnnnnnnnnnnnnnnnnnnnnnnnnnnnnnnnnnnnnnnnnnnnnnnnnnnnnnnnnnnnnnnnnnnnnnnnnnnnnnnnnnnnnnnnnnnnnnnnnnnnnnnnnnnnnnnnnnnnnnnnnnnnnnnnnnnnnnnnnnnnnnnnnnnnnnnnnnnnnnnnnnnnnnnnnnnnnnnnnnnnnnnnnnnnnnnnnnnnnnnnnnnnnnnnnnnnnnnnnnnnnnnnnnnnnnnnnnnnnnnnnnnnnnnnnnnnnnnnnnnnnnnnnnnnnnnnnnnnnnnnnnnnnnnnnnnnnnnnnnnnnnnnnnnnnnnnnnnnnnnnnnnnnnnnnnnnnnnnnnnnnnnnnnnnnnnnnnnnnnnnnnnnnnnnnnnnnnnnnnnnnnnnnnnnnnnnnnnnnnnnnnnnnnnnnnnnnnnnnnnnnnnnnnnnnnnnnnnnnnnnnnnnnnnnnnnnnnnnnnnnnnnnnnnnnnnnnnnnnnnnnnnnnnnnnnnnnnnnnnnnnnnnnnnnnnnnnnnnnnnnnnnnnnnnnnnnnnnnnnnnnnnnnnnnnnnnnnnnnnnnnnnnnnnnnnnnnnnnnnnnnnnnnnnnnnnnnnnnnnnnnnnnnnnnnnnnnnnnnnnnnnnnnnnnnnnnnnnnnnnnnnnnnnnnnnnnnnnnnnnnnnnnnnnnnnnnnnnnnnnnnnnnnnnnnnnnnnnnnnnnnnnnnnnnnnnnnnnnnnnnnnnnnnnnnnnnnnnnnnnnnnnnnnnnnnnnnnnnnnnnnnnnnnnnnnnnnnnnnnnnnnnnnnnnnnnnnnnnnnnnnnnnnnnnnnnnnnnnnnnnnnnnnnnnnnnnnnnnnnnnnnnnnnnnnnnnnnnnnnnnnnnnnnnnnnnnnnnnnnnnnnnnnnnnnnnnnnnnnnnnnnnnnnnnnnnnnnnnnnnnnnnnnnnnnnnnnnnnnnnnnnnnnnnnnnnnnnnnnnnnnnnnnnnnnnnnnnnnnnnnnnnnnnnnnnnnnnnnnnnnnnnnnnnnnnnnnnnnnnnnnnnnnnnnnnnnnnnnnnnnnnnnnnnnnnnnnnnnnnnnnnnnnnnnnnnnnnnnnnnnnnnnnnnnnnnnnnnnnnnnnnnnnnnnnnnnnnnnnnnnnnnnnnnnnnnnnnnnnnnnnnnnnnnnnnnnnnnnnnnnnnnnnnnnnnnnnnnnnnnnnnnnnnnnnnnnnnnnnnnnnnnnnnnnnnnnnnnnnnnnnnnnnnnnnnnnnnnnnnnnnnnnnnnnnnnnnnnnnnnnnnnnnnnnnnnnnnnnnnnnnnnnnnnnnnnnnnnnnnnnnnnnnnnnnnnnnnnnnnnnnnnnnnnnnnnnnnnnnnnnnnnnnnnnnnnnnnnnnnnnnnnnnnnnnnnnnnnnnnnnnnnnnnnnnnnnnnnnnnnnnnnnnnnnnnnnnnnnnnnnnnnnnnnnnnnnnnnnnnnnnnnnnnnnnnnnnnnnnnnnnnnnnnnnnnnnnnnnnnnnnnnnnnnnnnnnnnnnnnnnnnnnnnnnnnnnnnnnnnnnnnnnnnnnnnnnnnnnnnnnnnnnnnnnnnnnnnnnnnnnnnnnnnnnnnnnnnnnnnnnnnnnnnnnnnnnnnnnnnnnnnnnnnnnnnnnnnnnnnnnnnnnnnnnnnnnnnnnnnnnnnnnnnnnnnnnnnnnnnnnnnnnnnnnnnnnnnnnnnnnnnnnnnnnnnnnnnnnnnnnnnnnnnnnnnnnnnnnnnnnnnnnnnnnnnnnnnnnnnnnnnnnnnnnnnnnnnnnnnnnnnnnnnnnnnnnnnnnnnnnnnnnnnnnnnnnnnnnnnnnnnnnnnnnnnnnnnnnnnnnnnnnnnnnnnnnnnnnnnnnnnnnnnnnnnnnnnnnnnnnnnnnnnnnnnnnnnnnnnnnnnnnnnnnnnnnnnnnnnnnnnnnnnnnnnnnnnnnnnnnnnnnnnnnnnnnnnnnnnnnnnnnnnnnnnnnnnnnnnnnnnnnnnnnnnnnnnnnnnnnnnnnnnnnnnnnnnnnnnnnnnnnnnnnnnnnnnnnnnnnnnnnnnnnnnnnnnnnnnnnnnnnnnnnnnnnnnnnnnnnnnnnnnnnnnnnnnnnnnnnnnnnnnnnnnnnnnnnnnnnnnnnnnnnnnnnnnnnnnnnnnnnnnnnnnnnnnnnnnnnnnnnnnnnnnnnnnnnnnnnnnnnnnnnnnnnnnnnnnnnnnnnnnnnnnnnnnnnnnnnnnnnnnnnnnnnnnnnnnnnnnnnnnnnnnnnnnnnnnnnnnnnnnnnnnnnnnnnnnnnnnnnnnnnnnnnnnnnnnnnnnnnnnnnnnnnnnnnnnnnnnnnnnnnnnnnnnnnnnnnnnnnnnnnnnnnnnnnnnnnnnnnnnnnnnnnnnnnnnnnnnnnnnnnnnnnnnnnnnnnnnnnnnnnnnnnnnnnnnnnnnnnnnnnnnnnnnnnnnnnnnnnnnnnnnnnnnnnnnnnnnnnnnnnnnnnnnnnnnnnnnnnnnnnnnnnnnnnnnnnnnnnnnnnnnnnnnnnnnnnnnnnnnnnnnnnnnnnnnnnnnnnnnnnnnnnnnnnnnnnnnnnnnnnnnnnnnnnnnnnnnnnnnnnnnnnnnnnnnnnnnnnnnnnnnnnnnnnnnnnnnnnnnnnnnnnnnnnnnnnnnnnnnnnnnnnnnnnnnnnnnnnnnnnnnnnnnnnnnnnnnnnnnnnnnnnnnnnnnnnnnnnnnnnnnnnnnnnnnnnnnnnnnnnnnnnnnnnnnnnnnnnnnnnnnnnnnnnnnnnnnnnnnnnnnnnnnnnnnnnnnnnnnnnnnnnnnnnnnnnnnnnnnnnnnnnnnnnnnnnnnnnnnnnnnnnnnnnnnnnnnnnnnnnnnnnnnnnnnnnnnnnnnnnnnnnnnnnnnnnnnnnnnnnnnnnnnnnnnnnnnnnnnnnnnnnnnnnnnnnnnnnnnnnnnnnnnnnnnnnnnnnnnnnnnnnnnnnnnnnnnnnnnnnnnnnnnnnnnnnnnnnnnnnnnnnnnnnnnnnnnnnnnnnnnnnnnnnnnnnnnnnnnnnnnnnnnnnnnnnnnnnnnnnnnnnnnnnnnnnnnnnnnnnnnnnnnnnnnnnnnnnnnnnnnnnnnnnnnnnnnnnnnnnnnnnnnnnnnnnnnnnnnnnnnnnnnnnnnnnnnnnnnnnnnnnnnnnnnnnnnnnnnnnnnnnnnnnnnnnnnnnnnnnnnnnnnnnnnnnnnnnnnnnnnnnnnnnnnnnnnnnnnnnnnnnnnnnnnnnnnnnnnnnnnnnnnnnnnnnnnnnnnnnnnnnnnnnnnnnnnnnnnnnnnnnnnnnnnnnnnnnnnnnnnnnnnnnnnnnnnnnnnnnnnnnnnnnnnnnnnnnnnnnnnnnnnnnnnnnnnnnnnnnnnnnnnnnnnnnnnnnnnnnnnnnnnnnnnnnnnnnnnnnnnnnnnnnnnnnnnnnnnnnnnnnnnnnnnnnnnnnnnnnnnnnnnnnnnnnnnnnnnnnnnnnnnnnnnnnnnnnnnnnnnnnnnnnnnnnnnnnnnnnnnnnnnnnnnnnnnnnnnnnnnnnnnnnnnnnnnnnnnnnnnnnnnnnnnnnnnnnnnnnnnnnnnnnnnnnnnnnnnnnnnnnnnnnnnnnnnnnnnnnnnnnnnnnnnnnnnnnnnnnnnnnnnnnnnnnnnnnnnnnnnnnnnnnnnnnnnnnnnnnnnnnnnnnnnnnnnnnnnnnnnnnnnnnnnnnnnnnnnnnnnnnnnnnnnnnnnnnnnnnnnnnnnnnnnnnnnnnnnnnnnnnnnnnnnnnnnnnnnnnnnnnnnnnnnnnnnnnnnnnnnnnnnnnnnnnnnnnnnnnnnnnnnnnnnnnnnnnnnnnnnnnnnnnnnnnnnnnnnnnnnnnnnnnnnnnnnnnnnnnnnnnnnnnnnnnnnnnnnnnnnnnnnnnnnnnnnnnnnnnnnnnnnnnnnnnnnnnnnnnnnnnnnnnnnnnnnnnnnnnnnnnnnnnnnnnnnnnnnnnnnnnnnnnnnnnnnnnnnnnnnnnnnnnnnnnnnnnnnnnnnnnnnnnnnnnnnnnnnnnnnnnnnnnnnnnnnnnnnnnnnnnnnnnnnnnnnnnnnnnnnnnnnnnnnnnnnnnnnnnnnnnnnnnnnnnnnnnnnnnnnnnnnnnnnnnnnnnnnnnnnnnnnnnnnnnnnnnnnnnnnnnnnnnnnnnnnnnnnnnnnnnnnnnnnnnnnnnnnnnnnnnnnnnnnnnnnnnnnnnnnnnnnnnnnnnnnnnnnnnnnnnnnnnnnnnnnnnnnnnnnnnnnnnnnnnnnnnnnnnnnnnnnnnnnnnnnnnnnnnnnnnnnnnnnnnnnnnnnnnnnnnnnnnnnnnnnnnnnnnnnnnnnnnnnnnnnnnnnnnnnnnnnnnnnnnnnnnnnnnnnnnnnnnnnnnnnnnnnnnnnnnnnnnnnnnnnnnnnnnnnnnnnnnnnnnnnnnnnnnnnnnnnnnnnnnnnnnnnnnnnnnnnnnnnnnnnnnnnnnnnnnnnnnnnnnnnnnnnnnnnnnnnnnnnnnnnnnnnnnnnnnnnnnnnnnnnnnnnnnnnnnnnnnnnnnnnnnnnnnnnnnnnnnnnnnnnnnnnnnnnnnnnnnnnnnnnnnnnnnnnnnnnnnnnnnnnnnnnnnnnnnnnnnnnnnnnnnnnnnnnnnnnnnnnnnnnnnnnnnnnnnnnnnnnnnnnnnnnnnnnnnnnnnnnnnnnnnnnnnnnnnnnnnnnnnnnnnnnnnnnnnnnnnnnnnnnnnnnnnnnnnnnnnnnnnnnnnnnnnnnnnnnnnnnnnnnnnnnnnnnnnnnnnnnnnnnnnnnnnnnnnnnnnnnnnnnnnnnnnnnnnnnnnnnnnnnnnnnnnnnnnnnnnnnnnnnnnnnnnnnnnnnnnnnnnnnnnnnnnnnnnnnnnnnnnnnnnnnnnnnnnnnnnnnnnnnnnnnnnnnnnnnnnnnnnnnnnnnnnnnnnnnnnnnnnnnnnnnnnnnnnnnnnnnnnnnnnnnnnnnnnnnnnnnnnnnnnnnnnnnnnnnnnnnnnnnnnnnnnnnnnnnnnnnnnnnnnnnnnnnnnnnnnnnnnnnnnnnnnnnnnnnnnnnnnnnnnnnnnnnnnnnnnnnnnnnnnnnnnnnnnnnnnnnnnnnnnnnnnnnnnnnnnnnnnnnnnnnnnnnnnnnnnnnnnnnnnnnnnnnnnnnnnnnnnnnnnnnnnnnnnnnnnnnnnnnnnnnnnnnnnnnnnnnnnnnnnnnnnnnnnnnnnnnnnnnnnnnnnnnnnnnnnnnnnnnnnnnnnnnnnnnnnnnnnnnnnnnnnnnnnnnnnnnnnnnnnnnnnnnnnnnnnnnnnnnnnnnnnnnnnnnnnnnnnnnnnnnnnnnnnnnnnnnnnnnnnnnnnnnnnnnnnnnnnnnnnnnnnnnnnnnnnnnnnnnnnnnnnnnnnnnnnnnnnnnnnnnnnnnnnnnnnnnnnnnnnnnnnnnnnnnnnnnnnnnnnnnnnnnnnnnnnnnnnnnnnnnnnnnnnnnnnnnnnnnnnnnnnnnnnnnnnnnnnnnnnnnnnnnnnnnnnnnnnnnnnnnnnnnnnnnnnnnnnnnnnnnnnnnnnnnnnnnnnnnnnnnnnnnnnnnnnnnnnnnnnnnnnnnnnnnnnnnnnnnnnnnnnnnnnnnnnnnnnnnnnnnnnnnnnnnnnnnnnnnnnnnnnnnnnnnnnnnnnnnnnnnnnnnnnnnnnnnnnnnnnnnnnnnnnnnnnnnnnnnnnnnnnnnnnnnnnnnnnnnnnnnnnnnnnnnnnnnnnnnnnnnnnnnnnnnnnnnnnnnnnnnnnnnnnnnnnnnnnnnnnnnnnnnnnnnnnnnnnnnnnnnnnnnnnnnnnnnnnnnnnnnnnnnnnnnnnnnnnnnnnnnnnnnnnnnnnnnnnnnnnnnnnnnnnnnnnnnnnnnnnnnnnnnnnnnnnnnnnnnnnnnnnnnnnnnnnnnnnnnnnnnnnnnnnnnnnnnnnnnnnnnnnnnnnnnnnnnnnnnnnnnnnnnnnnnnnnnnnnnnnnnnnnnnnnnnnnnnnnnnnnnnnnnnnnnnnnnnnnnnnnnnnnnnnnnnnnnnnnnnnnnnnnnnnnnnnnnnnnnnnnnnnnnnnnnnnnnnnnnnnnnnnnnnnnnnnnnnnnnnnnnnnnnnnnnnnnnnnnnnnnnnnnnnnnnnnnnnnnnnnnnnnnnnnnnnnnnnnnnnnnnnnnnnnnnnnnnnnnnnnnnnnnnnnnnnnnnnnnnnnnnnnnnnnnnnnnnnnnnnnnnnnnnnnnnnnnnnnnnnnnnnnnnnnnnnnnnnnnnnnnnnnnnnnnnnnnnnnnnnnnnnnnnnnnnnnnnnnnnnnnnnnnnnnnnnnnnnnnnnnnnnnnnnnnnnnnnnnnnnnnnnnnnnnnnnnnnnnnnnnnnnnnnnnnnnnnnnnnnnnnnnnnnnnnnnnnnnnnnnnnnnnnnnnnnnnnnnnnnnnnnnnnnnnnnnnnnnnnnnnnnnnnnnnnnnnnnnnnnnnnnnnnnnnnnnnnnnnnnnnnnnnnnnnnnnnnnnnnnnnnnnnnnnnnnnnnnnnnnnnnnnnnnnnnnnnnnnnnnnnnnnnnnnnnnnnnnnnnnnnnnnnnnnnnnnnnnnnnnnnnnnnnnnnnnnnnnnnnnnnnnnnnnnnnnnnnnnnnnnnnnnnnnnnnnnnnnnnnnnnnnnnnnnnnnnnnnnnnnnnnnnnnnnnnnnnnnnnnnnnnnnnnnnnnnnnnnnnnnnnnnnnnnnnnnnnnnnnnnnnnnnnnnnnnnnnnnnnnnnnnnnnnnnnnnnnnnnnnnnnnnnnnnnnnnnnnnnnnnnnnnnnnnnnnnnnnnnnnnnnnnnnnnnnnnnnnnnnnnnnnnnnnnnnnnnnnnnnnnnnnnnnnnnnnnnnnnnnnnnnnnnnnnnnnnnnnnnnnnnnnnnnnnnnnnnnnnnnnnnnnnnnnnnnnnnnnnnnnnnnnnnnnnnnnnnnnnnnnnnnnnnnnnnnnnnnnnnnnnnnnnnnnnnnnnnnnnnnnnnnnnnnnnnnnnnnnnnnnnnnnnnnnnnnnnnnnnnnnnnnnnnnnnnnnnnnnnnnnnnnnnnnnnnnnnnnnnnnnnnnnnnnnnnnnnnnnnnnnnnnnnnnnnnnnnnnnnnnnnnnnnnnnnnnnnnnnnnnnnnnnnnnnnnnnnnnnnnnnnnnnnnnnnnnnnnnnnnnnnnnnnnnnnnnnnnnnnnnnnnnnnnnnnnnnnnnnnnnnnnnnnnnnnnnnnnnnnnnnnnnnnnnnnnnnnnnnnnnnnnnnnnnnnnnnnnnnnnnnnnnnnnnnnnnnnnnnnnnnnnnnnnnnnnnnnnnnnnnnnnnnnnnnnnnnnnnnnnnnnnnnnnnnnnnnnnnnnnnnnnnnnnnnnnnnnnnnnnnnnnnnnnnnnnnnnnnnnnnnnnnnnnnnnnnnnnnnnnnnnnnnnnnnnnnnnnnnnnnnnnnnnnnnnnnnnnnnnnnnnnnnnnnnnnnnnnnnnnnnnnnnnnnnnnnnnnnnnnnnnnnnnnnnnnnnnnnnnnnnnnnnnnnnnnnnnnnnnnnnnnnnnnnnnnnnnnnnnnnnnnnnnnnnnnnnnnnnnnnnnnnnnnnnnnnnnnnnnnnnnnnnnnnnnnnnnnnnnnnnnnnnnnnnnnnnnnnnnnnnnnnnnnnnnnnnnnnnnnnnnnnnnnnnnnnnnnnnnnnnnnnnnnnnnnnnnnnnnnnnnnnnnnnnnnnnnnnnnnnnnnnnnnnnnnnnnnnnnnnnnnnnnnnnnnnnnnnnnnnnnnnnnnnnnnnnnnnnnnnnnnnnnnnnnnnnnnnnnnnnnnnnnnnnnnnnnnnnnnnnnnnnnnnnnnnnnnnnnnnnnnnnnnnnnnnnnnnnnnnnnnnnnnnnnnnnnnnnnnnnnnnnnnnnnnnnnnnnnnnnnnnnnnnnnnnnnnnnnnnnnnnnnnnnnnnnnnnnnnnnnnnnnnnnnnnnnnnnnnnnnnnnnnnnnnnnnnnnnnnnnnnnnnnnnnnnnnnnnnnnnnnnnnnnnnnnnnnnnnnnnnnnnnnnnnnnnnnnnnnnnnnnnnnnnnnnnnnnnnnnnnnnnnnnnnnnnnnnnnnnnnnnnnnnnnnnnnnnnnnnnnnnnnnnnnnnnnnnnnnnnnnnnnnnnnnnnnnnnnnnnnnnnnnnnnnnnnnnnnnnnnnnnnnnnnnnnnnnnnnnnnnnnnnnnnnnnnnnnnnnnnnnnnnnnnnnnnnnnnnnnnnnnnnnnnnnnnnnnnnnnnnnnnnnnnnnnnnnnnnnnnnnnnnnnnnnnnnnnnnnnnnnnnnnnnnnnnnnnnnnnnnnnnnnnnnnnnnnnnnnnnnnnnnnnnnnnnnnnnnnnnnnnnnnnnnnnnnnnnnnnnnnnnnnnnnnnnnnnnnnnnnnnnnnnnnnnnnnnnnnnnnnnnnnnnnnnnnnnnnnnnnnnnnnnnnnnnnnnnnnnnnnnnnnnnnnnnnnnnnnnnnnnnnnnnnnnnnnnnnnnnnnnnnnnnnnnnnnnnnnnnnnnnnnnnnnnnnnnnnnnnnnnnnnnnnnnnnnnnnnnnnnnnnnnnnnnnnnnnnnnnnnnnnnnnnnnnnnnnnnnnnnnnnnnnnnnnnnnnnnnnnnnnnnnnnnnnnnnnnnnnnnnnnnnnnnnnnnnnnnnnnnnnnnnnnnnnnnnnnnnnnnnnnnnnnnnnnnnnnnnnnnnnnnnnnnnnnnnnnnnnnnnnnnnnnnnnnnnnnnnnnnnnnnnnnnnnnnnnnnnnnnnnnnnnnnnnnnnnnnnnnnnnnnnnnnnnnnnnnnnnnnnnnnnnnnnnnnnnnnnnnnnnnnnnnnnnnnnnnnnnnnnnnnnnnnnnnnnnnnnnnnnnnnnnnnnnnnnnnnnnnnnnnnnnnnnnnnnnnnnnnnnnnnnnnnnnnnnnnnnnnnnnnnnnnnnnnnnnnnnnnnnnnnnnnnnnnnnnnnnnnnnnnnnnnnnnnnnnnnnnnnnnnnnnnnnnnnnnnnnnnnnnnnnnnnnnnnnnnnnnnnnnnnnnnnnnnnnnnnnnnnnnnnnnnnnnnnnnnnnnnnnnnnnnnnnnnnnnnnnnnnnnnnnnnnnnnnnnnnnnnnnnnnnnnnnnnnnnnnnnnnnnnnnnnnnnnnnnnnnnnnnnnnnnnnnnnnnnnnnnnnnnnnnnnnnnnnnnnnnnnnnnnnnnnnnnnnnnnnnnnnnnnnnnnnnnnnnnnnnnnnnnnnnnnnnnnnnnnnnnnnnnnnnnnnnnnnnnnnnnnnnnnnnnnnnnnnnnnnnnnnnnnnnnnnnnnnnnnnnnnnnnnnnnnnnnnnnnnnnnnnnnnnnnnnnnnnnnnnnnnnnnnnnnnnnnnnnnnnnnnnnnnnnnnnnnnnnnnnnnnnnnnnnnnnnnnnnnnnnnnnnnnnnnnnnnnnnnnnnnnnnnnnnnnnnnnnnnnnnnnnnnnnnnnnnnnnnnnnnnnnnnnnnnnnnnnnnnnnnnnnnnnnnnnnnnnnnnnnnnnnnnnnnnnnnnnnnnnnnnnnnnnnnnnnnnnnnnnnnnnnnnnnnnnnnnnnnnnnnnnnnnnnnnnnnnnnnnnnnnnnnnnnnnnnnnnnnnnnnnnnnnnnnnnnnnnnnnnnnnnnnnnnnnnnnnnnnnnnnnnnnnnnnnnnnnnnnnnnnnnnnnnnnnnnnnnnnnnnnnnnnnnnnnnnnnnnnnnnnnnnnnnnnnnnnnnnnnnnnnnnnnnnnnnnnnnnnnnnnnnnnnnnnnnnnnnnnnnnnnnnnnnnnnnnnnnnnnnnnnnnnnnnnnnnnnnnnnnnnnnnnnnnnnnnnnnnnnnnnnnnnnnnnnnnnnnnnnnnnnnnnnnnnnnnnnnnnnnnnnnnnnnnnnnnnnnnnnnnnnnnnnnnnnnnnnnnnnnnnnnnnnnnnnnnnnnnnnnnnnnnnnnnnnnnnnnnnnnnnnnnnnnnnnnnnnnnnnnnnnnnnnnnnnnnnnnnnnnnnnnnnnnnnnnnnnnnnnnnnnnnnnnnnnnnnnnnnnnnnnnnnnnnnnnnnnnnnnnnnnnnnnnnnnnnnnnnnnnnnnnnnnnnnnnnnnnnnnnnnnnnnnnnnnnnnnnnnnnnnnnnnnnnnnnnnnnnnnnnnnnnnnnnnnnnnnnnnnnnnnnnnnnnnnnnnnnnnnnnnnnnnnnnnnnnnnnnnnnnnnnnnnnnnnnnnnnnnnnnnnnnnnnnnnnnnnnnnnnnnnnnnnnnnnnnnnnnnnnnnnnnnnnnnnnnnnnnnnnnnnnnnnnnnnnnnnnnnnnnnnnnnnnnnnnnnnnnnnnnnnnnnnnnnnnnnnnnnnnnnnnnnnnnnnnnnnnnnnnnnnnnnnnnnnnnnnnnnnnnnnnnnnnnnnnnnnnnnnnnnnnnnnnnnnnnnnnnnnnnnnnnnnnnnnnnnnnnnnnnnnnnnnnnnnnnnnnnnnnnnnnnnnnnnnnnnnnnnnnnnnnnnnnnnnnnnnnnnnnnnnnnnnnnnnnnnnnnnnnnnnnnnnnnnnnnnnnnnnnnnnnnnnnnnnnnnnnnnnnnnnnnnnnnnnnnnnnnnnnnnnnnnnnnnnnnnnnnnnnnnnnnnnnnnnnnnnnnnnnnnnnnnnnnnnnnnnnnnnnnnnnnnnnnnnnnnnnnnnnnnnnnnnnnnnnnnnnnnnnnnnnnnnnnnnnnnnnnnnnnnnnnnnnnnnnnnnnnnnnnnnnnnnnnnnnnnnnnnnnnnnnnnnnnnnnnnnnnnnnnnnnnnnnnnnnnnnnnnnnnnnnnnnnnnnnnnnnnnnnnnnnnnnnnnnnnnnnnnnnnnnnnnnnnnnnnnnnnnnnnnnnnnnnnnnnnnnnnnnnnnnnnnnnnnnnnnnnnnnnnnnnnnnnnnnnnnnnnnnnnnnnnnnnnnnnnnnnnnnnnnnnnnnnnnnnnnnnnnnnnnnnnnnnnnnnnnnnnnnnnnnnnnnnnnnnnnnnnnnnnnnnnnnnnnnnnnnnnnnnnnnnnnnnnnnnnnnnnnnnnnnnnnnnnnnnnnnnnnnnnnnnnnnnnnnnnnnnnnnnnnnnnnnnnnnnnnnnnnnnnnnnnnnnnnnnnnnnnnnnnnnnnnnnnnnnnnnnnnnnnnnnnnnnnnnnnnnnnnnnnnnnnnnnnnnnnnnnnnnnnnnnnnnnnnnnnnnnnnnnnnnnnnnnnnnnnnnnnnnnnnnnnnnnnnnnnnnnnnnnnnnnnnnnnnnnnnnnnnnnnnnnnnnnnnnnnnnnnnnnnnnnnnnnnnnnnnnnnnnnnnnnnnnnnnnnnnnnnnnnnnnnnnnnnnnnnnnnnnnnnnnnnnnnnnnnnnnnnnnnnnnnnnnnnnnnnnnnnnnnnnnnnnnnnnnnnnnnnnnnnnnnnnnnnnnnnnnnnnnnnnnnnnnnnnnnnnnnnnnnnnnnnnnnnnnnnnnnnnnnnnnnnnnnnnnnnnnnnnnnnnnnnnnnnnnnnnnnnnnnnnnnnnnnnnnnnnnnnnnnnnnnnnnnnnnnnnnnnnnnnnnnnnnnnnnnnnnnnnnnnnnnnnnnnnnnnnnnnnnnnnnnnnnnnnnnnnnnnnnnnnnnnnnnnnnnnnnnnnnnnnnnnnnnnnnnnnnnnnnnnnnnnnnnnnnnnnnnnnnnnnnnnnnnnnnnnnnnnnnnnnnnnnnnnnnnnnnnnnnnnnnnnnnnnnnnnnnnnnnnnnnnnnnnnnnnnnnnnnnnnnnnnnnnnnnnnnnnnnnnnnnnnnnnnnnnnnnnnnnnnnnnnnnnnnnnnnnnnnnnnnnnnnnnnnnnnnnnnnnnnnnnnnnnnnnnnnnnnnnnnnnnnnnnnnnnnnnnnnnnnnnnnnnnnnnnnnnnnnnnnnnnnnnnnnnnnnnnnnnnnnnnnnnnnnnnnnnnnnnnnnnnnnnnnnnnnnnnnnnnnnnnnnnnnnnnnnnnnnnnnnnnnnnnnnnnnnnnnnnnnnnnnnnnnnnnnnnnnnnnnnnnnnnnnnnnnnnnnnnnnnnnnnnnnnnnnnnnnnnnnnnnnnnnnnnnnnnnnnnnnnnnnnnnnnnnnnnnnnnnnnnnnnnnnnnnnnnnnnnnnnnnnnnnnnnnnnnnnnnnnnnnnnnnnnnnnnnnnnnnnnnnnnnnnnnnnnnnnnnnnnnnnnnnnnnnnnnnnnnnnnnnnnnnnnnnnnnnnnnnnnnnnnnnnnnnnnnnnnnnnnnnnnnnnnnnnnnnnnnnnnnnnnnnnnnnnnnnnnnnnnnnnnnnnnnnnnnnnnnnnnnnnnnnnnnnnnnnnnnnnnnnnnnnnnnnnnnnnnnnnnnnnnnnnnnnnnnnnnnnnnnnnnnnnnnnnnnnnnnnnnnnnnnnnnnnnnnnnnnnnnnnnnnnnnnnnnnnnnnnnnnnnnnnnnnnnnnnnnnnnnnnnnnnnnnnnnnnnnnnnnnnnnnnnnnnnnnnnnnnnnnnnnnnnnnnnnnnnnnnnnnnnnnnnnnnnnnnnnnnnnnnnnnnnnnnnnnnnnnnnnnnnnnnnnnnnnnnnnnnnnnnnnnnnnnnnnnnnnnnnnnnnnnnnnnnnnnnnnnnnnnnnnnnnnnnnnnnnnnnnnnnnnnnnnnnnnnnnnnnnnnnnnnnnnnnnnnnnnnnnnnnnnnnnnnnnnnnnnnnnnnnnnnnnnnnnnnnnnnnnnnnnnnnnnnnnnnnnnnnnnnnnnnnnnnnnnnnnnnnnnnnnnnnnnnnnnnnnnnnnnnnnnnnnnnnnnnnnnnnnnnnnnnnnnnnnnnnnnnnnnnnnnnnnnnnnnnnnnnnnnnnnnnnnnnnnnnnnnnnnnnnnnnnnnnnnnnnnnnnnnnnnnnnnnnnnnnnnnnnnnnnnnnnnnnnnnnnnnnnnnnnnnnnnnnnnnnnnnnnnnnnnnnnnnnnnnnnnnnnnnnnnnnnnnnnnnnnnnnnnnnnnnnnnnnnnnnnnnnnnnnnnnnnnnnnnnnnnnnnnnnnnnnnnnnnnnnnnnnnnnnnnnnnnnnnnnnnnnnnnnnnnnnnnnnnnnnnnnnnnnnnnnnnnnnnnnnnnnnnnnnnnnnnnnnnnnnnnnnnnnnnnnnnnnnnnnnnnnnnnnnnnnnnnnnnnnnnnnnnnnnnnnnnnnnnnnnnnnnnnnnnnnnnnnnnnnnnnnnnnnnnnnnnnnnnnnnnnnnnnnnnnnnnnnnnnnnnnnnnnnnnnnnnnnnnnnnnnnnnnnnnnnnnnnnnnnnnnnnnnnnnnnnnnnnnnnnnnnnnnnnnnnnnnnnnnnnnnnnnnnnnnnnnnnnnnnnnnnnnnnnnnnnnnnnnnnnnnnnnnnnnnnnnnnnnnnnnnnnnnnnnnnnnnnnnnnnnnnnnnnnnnnnnnnnnnnnnnnnnnnnnnnnnnnnnnnnnnnnnnnnnnnnnnnnnnnnnnnnnnnnnnnnnnnnnnnnnnnnnnnnnnnnnnnnnnnnnnnnnnnnnnnnnnnnnnnnnnnnnnnnnnnnnnnnnnnnnnnnnnnnnnnnnnnnnnnnnnnnnnnnnnnnnnnnnnnnnnnnnnnnnnnnnnnnnnnnnnnnnnnnnnnnnnnnnnnnnnnnnnnnnnnnnnnnnnnnnnnnnnnnnnnnnnnnnnnnnnnnnnnnnnnnnnnnnnnnnnnnnnnnnnnnnnnnnnnnnnnnnnnnnnnnnnnnnnnnnnnnnnnnnnnnnnnnnnnnnnnnnnnnnnnnnnnnnnnnnnnnnnnnnnnnnnnnnnnnnnnnnnnnnnnnnnnnnnnnnnnnnnnnnnnnnnnnnnnnnnnnnnnnnnnnnnnnnnnnnnnnnnnnnnnnnnnnnnnnnnnnnnnnnnnnnnnnnnnnnnnnnnnnnnnnnnnnnnnnnnnnnnnnnnnnnnnnnnnnnnnnnnnnnnnnnnnnnnnnnnnnnnnnnnnnnnnnnnnnnnnnnnnnnnnnnnnnnnnnnnnnnnnnnnnnnnnnnnnnnnnnnnnnnnnnnnnnnnnnnnnnnnnnnnnnnnnnnnnnnnnnnnnnnnnnnnnnnnnnnnnnnnnnnnnnnnnnnnnnnnnnnnnnnnnnnnnnnnnnnnnnnnnnnnnnnnnnnnnnnnnnnnnnnnnnnnnnnnnnnnnnnnnnnnnnnnnnnnnnnnnnnnnnnnnnnnnnnnnnnnnnnnnnnnnnnnnnnnnnnnnnnnnnnnnnnnnnnnnnnnnnnnnnnnnnnnnnnnnnnnnnnnnnnnnnnnnnnnnnnnnnnnnnnnnnnnnnnnnnnnnnnnnnnnnnnnnnnnnnnnnnnnnnnnnnnnnnnnnnnnnnnnnnnnnnnnnnnnnnnnnnnnnnnnnnnnnnnnnnnnnnnnnnnnnnnnnnnnnnnnnnnnnnnnnnnnnnnnnnnnnnnnnnnnnnnnnnnnnnnnnnnnnnnnnnnnnnnnnnnnnnnnnnnnnnnnnnnnnnnnnnnnnnnnnnnnnnnnnnnnnnnnnnnnnnnnnnnnnnnnnnnnnnnnnnnnnnnnnnnnnnnnnnnnnnnnnnnnnnnnnnnnnnnnnnnnnnnnnnnnnnnnnnnnnnnnnnnnnnnnnnnnnnnnnnnnnnnnnnnnnnnnnnnnnnnnnnnnnnnnnnnnnnnnnnnnnnnnnnnnnnnnnnnnnnnnnnnnnnnnnnnnnnnnnnnnnnnnnnnnnnnnnnnnnnnnnnnnnnnnnnnnnnnnnnnnnnnnnnnnnnnnnnnnnnnnnnnnnnnnnnnnnnnnnnnnnnnnnnnnnnnnnnnnnnnnnnnnnnnnnnnnnnnnnnnnnnnnnnnnnnnnnnnnnnnnnnnnnnnnnnnnnnnnnnnnnnnnnnnnnnnnnnnnnnnnnnnnnnnnnnnnnnnnnnnnnnnnnnnnnnnnnnnnnnnnnnnnnnnnnnnnnnnnnnnnnnnnnnnnnnnnnnnnnnnnnnnnnnnnnnnnnnnnnnnnnnnnnnnnnnnnnnnnnnnnnnnnnnnnnnnnnnnnnnnnnnnnnnnnnnnnnnnnnnnnnnnnnnnnnnnnnnnnnnnnnnnnnnnnnnnnnnnnnnnnnnnnnnnnnnnnnnnnnnnnnnnnnnnnnnnnnnnnnnnnnnnnnnnnnnnnnnnnnnnnnnnnnnnnnnnnnnnnnnnnnnnnnnnnnnnnnnnnnnnnnnnnnnnnnnnnnnnnnnnnnnnnnnnnnnnnnnnnnnnnnnnnnnnnnnnnnnnnnnnnnnnnnnnnnnnnnnnnnnnnnnnnnnnnnnnnnnnnnnnnnnnnnnnnnnnnnnnnnnnnnnnnnnnnnnnnnnnnnnnnnnnnnnnnnnnnnnnnnnnnnnnnnnnnnnnnnnnnnnnnnnnnnnnnnnnnnnnnnnnnnnnnnnnnnnnnnnnnnnnnnnnnnnnnnnnnnnnnnnnnnnnnnnnnnnnnnnnnnnnnnnnnnnnnnnnnnnnnnnnnnnnnnnnnnnnnnnnnnnnnnnnnnnnnnnnnnnnnnnnnnnnnnnnnnnnnnnnnnnnnnnnnnnnnnnnnnnnnnnnnnnnnnnnnnnnnnnnnnnnnnnnnnnnnnnnnnnnnnnnnnnnnnnnnnnnnnnnnnnnnnnnnnnnnnnnnnnnnnnnnnnnnnnnnnnnnnnnnnnnnnnnnnnnnnnnnnnnnnnnnnnnnnnnnnnnnnnnnnnnnnnnnnnnnnnnnnnnnnnnnnnnnnnnnnnnnnnnnnnnnnnnnnnnnnnnnnnnnnnnnnnnnnnnnnnnnnnnnnnnnnnnnnnnnnnnnnnnnnnnnnnnnnnnnnnnnnnnnnnnnnnnnnnnnnnnnnnnnnnnnnnnnnnnnnnnnnnnnnnnnnnnnnnnnnnnnnnnnnnnnnnnnnnnnnnnnnnnnnnnnnnnnnnnnnnnnnnnnnnnnnnnnnnnnnnnnnnnnnnnnnnnnnnnnnnnnnnnnnnnnnnnnnnnnnnnnnnnnnnnnnnnnnnnnnnnnnnnnnnnnnnnnnnnnnnnnnnnnnnnnnnnnnnnnnnnnnnnnnnnnnnnnnnnnnnnnnnnnnnnnnnnnnnnnnnnnnnnnnnnnnnnnnnnnnnnnnnnnnnnnnnnnnnnnnnnnnnnnnnnnnnnnnnnnnnnnnnnnnnnnnnnnnnnnnnnnnnnnnnnnnnnnnnnnnnnnnnnnnnnnnnnnnnnnnnnnnnnnnnnnnnnnnnnnnnnnnnnnnnnnnnnnnnnnnnnnnnnnnnnnnnnnnnnnnnnnnnnnnnnnnnnnnnnnnnnnnnnnnnnnnnnnnnnnnnnnnnnnnnnnnnnnnnnnnnnnnnnnnnnnnnnnnnnnnnnnnnnnnnnnnnnnnnnnnnnnnnnnnnnnnnnnnnnnnnnnnnnnnnnnnnnnnnnnnnnnnnnnnnnnnnnnnnnnnnnnnnnnnnnnnnnnnnnnnnnnnnnnnnnnnnnnnnnnnnnnnnnnnnnnnnnnnnnnnnnnnnnnnnnnnnnnnnnnnnnnnnnnnnnnnnnnnnnnnnnnnnnnnnnnnnnnnnnnnnnnnnnnnnnnnnnnnnnnnnnnnnnnnnnnnnnnnnnnnnnnnnnnnnnnnnnnnnnnnnnnnnnnnnnnnnnnnnnnnnnnnnnnnnnnnnnnnnnnnnnnnnnnnnnnnnnnnnnnnnnnnnnnnnnnnnnnnnnnnnnnnnnnnnnnnnnnnnnnnnnnnnnnnnnnnnnnnnnnnnnnnnnnnnnnnnnnnnnnnnnnnnnnnnnnnnnnnnnnnnnnnnnnnnnnnnnnnnnnnnnnnnnnnnnnnnnnnnnnnnnnnnnnnnnnnnnnnnnnnnnnnnnnnnnnnnnnnnnnnnnnnnnnnnnnnnnnnnnnnnnnnnnnnnnnnnnnnnnnnnnnnnnnnnnnnnnnnnnnnnnnnnnnnnnnnnnnnnnnnnnnnnnnnnnnnnnnnnnnnnnnnnnnnnnnnnnnnnnnnnnnnnnnnnnnnnnnnnnnnnnnnnnnnnnnnnnnnnnnnnnnnnnnnnnnnnnnnnnnnnnnnnnnnnnnnnnnnnnnnnnnnnnnnnnnnnnnnnnnnnnnnnnnnnnnnnnnnnnnnnnnnnnnnnnnnnnnnnnnnnnnnnnnnnnnnnnnnnnnnnnnnnnnnnnnnnnnnnnnnnnnnnnnnnnnnnnnnnnnnnnnnnnnnnnnnnnnnnnnnnnnnnnnnnnnnnnnnnnnnnnnnnnnnnnnnnnnnnnnnnnnnnnnnnnnnnnnnnnnnnnnnnnnnnnnnnnnnnnnnnnnnnnnnnnnnnnnnnnnnnnnnnnnnnnnnnnnnnnnnnnnnnnnnnnnnnnnnnnnnnnnnnnnnnnnnnnnnnnnnnnnnnnnnnnnnnnnnnnnnnnnnnnnnnnnnnnnnnnnnnnnnnnnnnnnnnnnnnnnnnnnnnnnnnnnnnnnnnnnnnnnnnnnnnnnnnnnnnnnnnnnnnnnnnnnnnnnnnnnnnnnnnnnnnnnnnnnnnnnnnnnnnnnnnnnnnnnnnnnnnnnnnnnnnnnnnnnnnnnnnnnnnnnnnnnnnnnnnnnnnnnnnnnnnnnnnnnnnnnnnnnnnnnnnnnnnnnnnnnnnnnnnnnnnnnnnnnnnnnnnnnnnnnnnnnnnnnnnnnnnnnnnnnnnnnnnnnnnnnnnnnnnnnnnnnnnnnnnnnnnnnnnnnnnnnnnnnnnnnnnnnnnnnnnnnnnnnnnnnnnnnnnnnnnnnnnnnnnnnnnnnnnnnnnnnnnnnnnnnnnnnnnnnnnnnnnnnnnnnnnnnnnnnnnnnnnnnnnnnnnnnnnnnnnnnnnnnnnnnnnnnnnnnnnnnnnnnnnnnnnnnnnnnnnnnnnnnnnnnnnnnnnnnnnnnnnnnnnnnnnnnnnnnnnnnnnnnnnnnnnnnnnnnnnnnnnnnnnnnnnnnnnnnnnnnnnnnnnnnnnnnnnnnnnnnnnnnnnnnnnnnnnnnnnnnnnnnnnnnnnnnnnnnnnnnnnnnnnnnnnnnnnnnnnnnnnnnnnnnnnnnnnnnnnnnnnnnnnnnnnnnnnnnnnnnnnnnnnnnnnnnnnnnnnnnnnnnnnnnnnnnnnnnnnnnnnnnnnnnnnnnnnnnnnnnnnnnnnnnnnnnnnnnnnnnnnnnnnnnnnnnnnnnnnnnnnnnnnnnnnnnnnnnnnnnnnnnnnnnnnnnnnnnnnnnnnnnnnnnnnnnnnnnnnnnnnnnnnnnnnnnnnnnnnnnnnnnnnnnnnnnnnnnnnnnnnnnnnnnnnnnnnnnnnnnnnnnnnnnnnnnnnnnnnnnnnnnnnnnnnnnnnnnnnnnnnnnnnnnnnnnnnnnnnnnnnnnnnnnnnnnnnnnnnnnnnnnnnnnnnnnnnnnnnnnnnnnnnnnnnnnnnnnnnnnnnnnnnnnnnnnnnnnnnnnnnnnnnnnnnnnnnnnnnnnnnnnnnnnnnnnnnnnnnnnnnnnnnnnnnnnnnnnnnnnnnnnnnnnnnnnnnnnnnnnnnnnnnnnnnnnnnnnnnnnnnnnnnnnnnnnnnnnnnnnnnnnnnnnnnnnnnnnnnnnnnnnnnnnnnnnnnnnnnnnnnnnnnnnnnnnnnnnnnnnnnnnnnnnnnnnnnnnnnnnnnnnnnnnnnnnnnnnnnnnnnnnnnnnnnnnnnnnnnnnnnnnnnnnnnnnnnnnnnnnnnnnnnnnnnnnnnnnnnnnnnnnnnnnnnnnnnnnnnnnnnnnnnnnnnnnnnnnnnnnnnnnnnnnnnnnnnnnnnnnnnnnnnnnnnnnnnnnnnnnnnnnnnnnnnnnnnnnnnnnnnnnnnnnnnnnnnnnnnnnnnnnnnnnnnnnnnnnnnnnnnnnnnnnnnnnnnnnnnnnnnnnnnnnnnnnnnnnnnnnnnnnnnnnnnnnnnnnnnnnnnnnnnnnnnnnnnnnnnnnnnnnnnnnnnnnnnnnnnnnnnnnnnnnnnnnnnnnnnnnnnnnnnnnnnnnnnnnnnnnnnnnnnnnnnnnnnnnnnnnnnnnnnnnnnnnnnnnnnnnnnnnnnnnnnnnnnnnnnnnnnnnnnnnnnnnnnnnnnnnnnnnnnnnnnnnnnnnnnnnnnnnnnnnnnnnnnnnnnnnnnnnnnnnnnnnnnnnnnnnnnnnnnnnnnnnnnnnnnnnnnnnnnnnnnnnnnnnnnnnnnnnnnnnnnnnnnnnnnnnnnnnnnnnnnnnnnnnnnnnnnnnnnnnnnnnnnnnnnnnnnnnnnnnnnnnnnnnnnnnnnnnnnnnnnnnnnnnnnnnnnnnnnnnnnnnnnnnnnnnnnnnnnnnnnnnnnnnnnnnnnnnnnnnnnnnnnnnnnnnnnnnnnnnnnnnnnnnnnnnnnnnnnnnnnnnnnnnnnnnnnnnnnnnnnnnnnnnnnnnnnnnnnnnnnnnnnnnnnnnnnnnnnnnnnnnnnnnnnnnnnnnnnnnnnnnnnnnnnnnnnnnnnnnnnnnnnnnnnnnnnnnnnnnnnnnnnnnnnnnnnnnnnnnnnnnnnnnnnnnnnnnnnnnnnnnnnnnnnnnnnnnnnnnnnnnnnnnnnnnnnnnnnnnnnnnnnnnnnnnnnnnnnnnnnnnnnnnnnnnnnnnnnnnnnnnnnnnnnnnnnnnnnnnnnnnnnnnnnnnnnnnnnnnnnnnnnnnnnnnnnnnnnnnnnnnnnnnnnnnnnnnnnnnnnnnnnnnnnnnnnnnnnnnnnnnnnnnnnnnnnnnnnnnnnnnnnnnnnnnnnnnnnnnnnnnnnnnnnnnnnnnnnnnnnnnnnnnnnnnnnnnnnnnnnnnnnnnnnnnnnnnnnnnnnnnnnnnnnnnnnnnnnnnnnnnnnnnnnnnnnnnnnnnnnnnnnnnnnnnnnnnnnnnnnnnnnnnnnnnnnnnnnnnnnnnnnnnnnnnnnnnnnnnnnnnnnnnnnnnnnnnnnnnnnnnnnnnnnnnnnnnnnnnnnnnnnnnnnnnnnnnnnnnnnnnnnnnnnnnnnnnnnnnnnnnnnnnnnnnnnnnnnnnnnnnnnnnnnnnnnnnnnnnnnnnnnnnnnnnnnnnnnnnnnnnnnnnnnnnnnnnnnnnnnnnnnnnnnnnnnnnnnnnnnnnnnnnnnnnnnnnnnnnnnnnnnnnnnnnnnnnnnnnnnnnnnnnnnnnnnnnnnnnnnnnnnnnnnnnnnnnnnnnnnnnnnnnnnnnnnnnnnnnnnnnnnnnnnnnnnnnnnnnnnnnnnnnnnnnnnnnnnnnnnnnnnnnnnnnnnnnnnnnnnnnnnnnnnnnnnnnnnnnnnnnnnnnnnnnnnnnnnnnnnnnnnnnnnnnnnnnnnnnnnnnnnnnnnnnnnnnnnnnnnnnnnnnnnnnnnnnnnnnnnnnnnnnnnnnnnnnnnnnnnnnnnnnnnnnnnnnnnnnnnnnnnnnnnnnnnnnnnnnnnnnnnnnnnnnnnnnnnnnnnnnnnnnnnnnnnnnnnnnnnnnnnnnnnnnnnnnnnnnnnnnnnnnnnnnnnnnnnnnnnnnnnnnnnnnnnnnnnnnnnnnnnnnnnnnnnnnnnnnnnnnnnnnnnnnnnnnnnnnnnnnnnnnnnnnnnnnnnnnnnnnnnnnnnnnnnnnnnnnnnnnnnnnnnnnnnnnnnnnnnnnnnnnnnnnnnnnnnnnnnnnnnnnnnnnnnnnnnnnnnnnnnnnnnnnnnnnnnnnnnnnnnnnnnnnnnnnnnnnnnnnnnnnnnnnnnnnnnnnnnnnnnnnnnnnnnnnnnnnnnnnnnnnnnnnnnnnnnnnnnnnnnnnnnnnnnnnnnnnnnnnnnnnnnnnnnnnnnnnnnnnnnnnnnnnnnnnnnnnnnnnnnnnnnnnnnnnnnnnnnnnnnnnnnnnnnnnnnnnnnnnnnnnnnnnnnnnnnnnnnnnnnnnnnnnnnnnnnnnnnnnnnnnnnnnnnnnnnnnnnnnnnnnnnnnnnnnnnnnnnnnnnnnnnnnnnnnnnnnnnnnnnnnnnnnnnnnnnnnnnnnnnnnnnnnnnnnnnnnnnnnnnnnnnnnnnnnnnnnnnnnnnnnnnnnnnnnnnnnnnnnnnnnnnnnnnnnnnnnnnnnnnnnnnnnnnnnnnnnnnnnnnnnnnnnnnnnnnnnnnnnnnnnnnnnnnnnnnnnnnnnnnnnnnnnnnnnnnnnnnnnnnnnnnnnnnnnnnnnnnnnnnnnnnnnnnnnnnnnnnnnnnnnnnnnnnnnnnnnnnnnnnnnnnnnnnnnnnnnnnnnnnnnnnnnnnnnnnnnnnnnnnnnnnnnnnnnnnnnnnnnnnnnnnnnnnnnnnnnnnnnnnnnnnnnnnnnnnnnnnnnnnnnnnnnnnnnnnnnnnnnnnnnnnnnnnnnnnnnnnnnnnnnnnnnnnnnnnnnnnnnnnnnnnnnnnnnnnnnnnnnnnnnnnnnnnnnnnnnnnnnnnnnnnnnnnnnnnnnnnnnnnnnnnnnnnnnnnnnnnnnnnnnnnnnnnnnnnnnnnnnnnnnnnnnnnnnnnnnnnnnnnnnnnnnnnnnnnnnnnnnnnnnnnnnnnnnnnnnnnnnnnnnnnnnnnnnnnnnnnnnnnnnnnnnnnnnnnnnnnnnnnnnnnnnnnnnnnnnnnnnnnnnnnnnnnnnnnnnnnnnnnnnnnnnnnnnnnnnnnnnnnnnnnnnnnnnnnnnnnnnnnnnnnnnnnnnnnnnnnnnnnnnnnnnnnnnnnnnnnnnnnnnnnnnnnnnnnnnnnnnnnnnnnnnnnnnnnnnnnnnnnnnnnnnnnnnnnnnnnnnnnnnnnnnnnnnnnnnnnnnnnnnnnnnnnnnnnnnnnnnnnnnnnnnnnnnnnnnnnnnnnnnnnnnnnnnnnnnnnnnnnnnnnnnnnnnnnnnnnnnnnnnnnnnnnnnnnnnnnnnnnnnnnnnnnnnnnnnnnnnnnnnnnnnnnnnnnnnnnnnnnnnnnnnnnnnnnnnnnnnnnnnnnnnnnnnnnnnnnnnnnnnnnnnnnnnnnnnnnnnnnnnnnnnnnnnnnnnnnnnnnnnnnnnnnnnnnnnnnnnnnnnnnnnnnnnnnnnnnnnnnnnnnnnnnnnnnnnnnnnnnnnnnnnnnnnnnnnnnnnnnnnnnnnnnnnnnnnnnnnnnnnnnnnnnnnnnnnnnnnnnnnnnnnnnnnnnnnnnnnnnnnnnnnnnnnnnnnnnnnnnnnnnnnnnnnnnnnnnnnnnnnnnnnnnnnnnnnnnnnnnnnnnnnnnnnnnnnnnnnnnnnnnnnnnnnnnnnnnnnnnnnnnnnnnnnnnnnnnnnnnnnnnnnnnnnnnnnnnnnnnnnnnnnnnnnnnnnnnnnnnnnnnnnnnnnnnnnnnnnnnnnnnnnnnnnnnnnnnnnnnnnnnnnnnnnnnnnnnnnnnnnnnnnnnnnnnnnnnnnnnnnnnnnnnnnnnnnnnnnnnnnnnnnnnnnnnnnnnnnnnnnnnnnnnnnnnnnnnnnnnnnnnnnnnnnnnnnnnnnnnnnnnnnnnnnnnnnnnnnnnnnnnnnnnnnnnnnnnnnnnnnnnnnnnnnnnnnnnnnnnnnnnnnnnnnnnnnnnnnnnnnnnnnnnnnnnnnnnnnnnnnnnnnnnnnnnnnnnnnnnnnnnnnnnnnnnnnnnnnnnnnnnnnnnnnnnnnnnnnnnnnnnnnnnnnnnnnnnnnnnnnnnnnnnnnnnnnnnnnnnnnnnnnnnnnnnnnnnnnnnnnnnnnnnnnnnnnnnnnnnnnnnnnnnnnnnnnnnnnnnnnnnnnnnnnnnnnnnnnnnnnnnnnnnnnnnnnnnnnnnnnnnnnnnnnnnnnnnnnnnnnnnnnnnnnnnnnnnnnnnnnnnnnnnnnnnnnnnnnnnnnnnnnnnnnnnnnnnnnnnnnnnnnnnnnnnnnnnnnnnnnnnnnnnnnnnnnnnnnnnnnnnnnnnnnnnnnnnnnnnnnnnnnnnnnnnnnnnnnnnnnnnnnnnnnnnnnnnnnnnnnnnnnnnnnnnnnnnnnnnnnnnnnnnnnnnnnnnnnnnnnnnnnnnnnnnnnnnnnnnnnnnnnnnnnnnnnnnnnnnnnnnnnnnnnnnnnnnnnnnnnnnnnnnnnnnnnnnnnnnnnnnnnnnnnnnnnnnnnnnnnnnnnnnnnnnnnnnnnnnnnnnnnnnnnnnnnnnnnnnnnnnnnnnnnnnnnnnnnnnnnnnnnnnnnnnnnnnnnnnnnnnnnnnnnnnnnnnnnnnnnnnnnnnnnnnnnnnnnnnnnnnnnnnnnnnnnnnnnnnnnnnnnnnnnnnnnnnnnnnnnnnnnnnnnnnnnnnnnnnnnnnnnnnnnnnnnnnnnnnnnnnnnnnnnnnnnnnnnnnnnnnnnnnnnnnnnnnnnnnnnnnnnnnnnnnnnnnnnnnnnnnnnnnnnnnnnnnnnnnnnnnnnnnnnnnnnnnnnnnnnnnnnnnnnnnnnnnnnnnnnnnnnnnnnnnnnnnnnnnnnnnnnnnnnnnnnnnnnnnnnnnnnnnnnnnnnnnnnnnnnnnnnnnnnnnnnnnnnnnnnnnnnnnnnnnnnnnnnnnnnnnnnnnnnnnnnnnnnnnnnnnnnnnnnnnnnnnnnnnnnnnnnnnnnnnnnnnnnnnnnnnnnnnnnnnnnnnnnnnnnnnnnnnnnnnnnnnnnnnnnnnnnnnnnnnnnnnnnnnnnnnnnnnnnnnnnnnnnnnnnnnnnnnnnnnnnnnnnnnnnnnnnnnnnnnnnnnnnnnnnnnnnnnnnnnnnnnnnnnnnnnnnnnnnnnnnnnnnnnnnnnnnnnnnnnnnnnnnnnnnnnnnnnnnnnnnnnnnnnnnnnnnnnnnnnnnnnnnnnnnnnnnnnnnnnnnnnnnnnnnnnnnnnnnnnnnnnnnnnnnnnnnnnnnnnnnnnnnnnnnnnnnnnnnnnnnnnnnnnnnnnnnnnnnnnnnnnnnnnnnnnnnnnnnnnnnnnnnnnnnnnnnnnnnnnnnnnnnnnnnnnnnnnnnnnnnnnnnnnnnnnnnnnnnnnnnnnnnnnnnnnnnnnnnnnnnnnnnnnnnnnnnnnnnnnnnnnnnnnnnnnnnnnnnnnnnnnnnnnnnnnnnnnnnnnnnnnnnnnnnnnnnnnnnnnnnnnnnnnnnnnnnnnnnnnnnnnnnnnnnnnnnnnnnnnnnnnnnnnnnnnnnnnnnnnnnnnnnnnnnnnnnnnnnnnnnnnnnnnnnnnnnnnnnnnnnnnnnnnnnnnnnnnnnnnnnnnnnnnnnnnnnnnnnnnnnnnnnnnnnnnnnnnnnnnnnnnnnnnnnnnnnnnnnnnnnnnnnnnnnnnnnnnnnnnnnnnnnnnnnnnnnnnnnnnnnnnnnnnnnnnnnnnnnnnnnnnnnnnnnnnnnnnnnnnnnnnnnnnnnnnnnnnnnnnnnnnnnnnnnnnnnnnnnnnnnnnnnnnnnnnnnnnnnnnnnnnnnnnnnnnnnnnnnnnnnnnnnnnnnnnnnnnnnnnnnnnnnnnnnnnnnnnnnnnnnnnnnnnnnnnnnnnnnnnnnnnnnnnnnnnnnnnnnnnnnnnnnnnnnnnnnnnnnnnnnnnnnnnnnnnnnnnnnnnnnnnnnnnnnnnnnnnnnnnnnnnnnnnnnnnnnnnnnnnnnnnnnnnnnnnnnnnnnnnnnnnnnnnnnnnnnnnnnnnnnnnnnnnnnnnnnnnnnnnnnnnnnnnnnnnnnnnnnnnnnnnnnnnnnnnnnnnnnnnnnnnnnnnnnnnnnnnnnnnnnnnnnnnnnnnnnnnnnnnnnnnnnnnnnnnnnnnnnnnnnnnnnnnnnnnnnnnnnnnnnnnnnnnnnnnnnnnnnnnnnnnnnnnnnnnnnnnnnnnnnnnnnnnnnnnnnnnnnnnnnnnnnnnnnnnnnnnnnnnnnnnnnnnnnnnnnnnnnnnnnnnnnnnnnnnnnnnnnnnnnnnnnnnnnnnnnnnnnnnnnnnnnnnnnnnnnnnnnnnnnnnnnnnnnnnnnnnnnnnnnnnnnnnnnnnnnnnnnnnnnnnnnnnnnnnnnnnnnnnnnnnnnnnnnnnnnnnnnnnnnnnnnnnnnnnnnnnnnnnnnnnnnnnnnnnnnnnnnnnnnnnnnnnnnnnnnnnnnnnnnnnnnnnnnnnnnnnnnnnnnnnnnnnnnnnnnnnnnnnnnnnnnnnnnnnnnnnnnnnnnnnnnnnnnnnnnnnnnnnnnnnnnnnnnnnnnnnnnnnnnnnnnnnnnnnnnnnnnnnnnnnnnnnnnnnnnnnnnnnnnnnnnnnnnnnnnnnnnnnnnnnnnnnnnnnnnnnnnnnnnnnnnnnnnnnnnnnnnnnnnnnnnnnnnnnnnnnnnnnnnnnnnnnnnnnnnnnnnnnnnnnnnnnnnnnnnnnnnnnnnnnnnnnnnnnnnnnnnnnnnnnnnnnnnnnnnnnnnnnnnnnnnnnnnnnnnnnnnnnnnnnnnnnnnnnnnnnnnnnnnnnnnnnnnnnnnnnnnnnnnnnnnnnnnnnnnnnnnnnnnnnnnnnnnnnnnnnnnnnnnnnnnnnnnnnnnnnnnnnnnnnnnnnnnnnnnnnnnnnnnnnnnnnnnnnnnnnnnnnnnnnnnnnnnnnnnnnnnnnnnnnnnnnnnnnnnnnnnnnnnnnnnnnnnnnnnnnnnnnnnnnnnnnnnnnnnnnnnnnnnnnnnnnnnnnnnnnnnnnnnnnnnnnnnnnnnnnnnnnnnnnnnnnnnnnnnnnnnnnnnnnnnnnnnnnnnnnnnnnnnnnnnnnnnnnnnnnnnnnnnnnnnnnnnnnnnnnnnnnnnnnnnnnnnnnnnnnnnnnnnnnnnnnnnnnnnnnnnnnnnnnnnnnnnnnnnnnnnnnnnnnnnnnnnnnnnnnnnnnnnnnnnnnnnnnnnnnnnnnnnnnnnnnnnnnnnnnnnnnnnnnnnnnnnnnnnnnnnnnnnnnnnnnnnnnnnnnnnnnnnnnnnnnnnnnnnnnnnnnnnnnnnnnnnnnnnnnnnnnnnnnnnnnnnnnnnnnnnnnnnnnnnnnnnnnnnnnnnnnnnnnnnnnnnnnnnnnnnnnnnnnnnnnnnnnnnnnnnnnnnnnnnnnnnnnnnnnnnnnnnnnnnnnnnnnnnnnnnnnnnnnnnnnnnnnnnnnnnnnnnnnnnnnnnnnnnnnnnnnnnnnnnnnnnnnnnnnnnnnnnnnnnnnnnnnnnnnnnnnnnnnnnnnnnnnnnnnnnnnnnnnnnnnnnnnnnnnnnnnnnnnnnnnnnnnnnnnnnnnnnnnnnnnnnnnnnnnnnnnnnnnnnnnnnnnnnnnnnnnnnnnnnnnnnnnnnnnnnnnnnnnnnnnnnnnnnnnnnnnnnnnnnnnnnnnnnnnnnnnnnnnnnnnnnnnnnnnnnnnnnnnnnnnnnnnnnnnnnnnnnnnnnnnnnnnnnnnnnnnnnnnnnnnnnnnnnnnnnnnnnnnnnnnnnnnnnnnnnnnnnnnnnnnnnnnnnnnnnnnnnnnnnnnnnnnnnnnnnnnnnnnnnnnnnnnnnnnnnnnnnnnnnnnnnnnnnnnnnnnnnnnnnnnnnnnnnnnnnnnnnnnnnnnnnnnnnnnnnnnnnnnnnnnnnnnnnnnnnnnnnnnnnnnnnnnnnnnnnnnnnnnnnnnnnnnnnnnnnnnnnnnnnnnnnnnnnnnnnnnnnnnnnnnnnnnnnnnnnnnnnnnnnnnnnnnnnnnnnnnnnnnnnnnnnnnnnnnnnnnnnnnnnnnnnnnnnnnnnnnnnnnnnnnnnnnnnnnnnnnnnnnnnnnnnnnnnnnnnnnnnnnnnnnnnnnnnnnnnnnnnnnnnnnnnnnnnnnnnnnnnnnnnnnnnnnnnnnnnnnnnnnnnnnnnnnnnnnnnnnnnnnnnnnnnnnnnnnnnnnnnnnnnnnnnnnnnnnnnnnnnnnnnnnnnnnnnnnnnnnnnnnnnnnnnnnnnnnnnnnnnnnnnnnnnnnnnnnnnnnnnnnnnnnnnnnnnnnnnnnnnnnnnnnnnnnnnnnnnnnnnnnnnnnnnnnnnnnnnnnnnnnnnnnnnnnnnnnnnnnnnnnnnnnnnnnnnnnnnnnnnnnnnnnnnnnnnnnnnnnnnnnnnnnnnnnnnnnnnnnnnnnnnnnnnnnnnnnnnnnnnnnnnnnnnnnnnnnnnnnnnnnnnnnnnnnnnnnnnnnnnnnnnnnnnnnnnnnnnnnnnnnnnnnnnnnnnnnnnnnnnnnnnnnnnnnnnnnnnnnnnnnnnnnnnnnnnnnnnnnnnnnnnnnnnnnnnnnnnnnnnnnnnnnnnnnnnnnnnnnnnnnnnnnnnnnnnnnnnnnnnnnnnnnnnnnnnnnnnnnnnnnnnnnnnnnnnnnnnnnnnnnnnnnnnnnnnnnnnnnnnnnnnnnnnnnnnnnnnnnnnnnnnnnnnnnnnnnnnnnnnnnnnnnnnnnnnnnnnnnnnnnnnnnnnnnnnnnnnnnnnnnnnnnnnnnnnnnnnnnnnnnnnnnnnnnnnnnnnnnnnnnnnnnnnnnnnnnnnnnnnnnnnnnnnnnnnnnnnnnnnnnnnnnnnnnnnnnnnnnnnnnnnnnnnnnnnnnnnnnnnnnnnnnnnnnnnnnnnnnnnnnnnnnnnnnnnnnnnnnnnnnnnnnnnnnnnnnnnnnnnnnnnnnnnnnnnnnnnnnnnnnnnnnnnnnnnnnnnnnnnnnnnnnnnnnnnnnnnnnnnnnnnnnnnnnnnnnnnnnnnnnnnnnnnnnnnnnnnnnnnnnnnnnnnnnnnnnnnnnnnnnnnnnnnnnnnnnnnnnnnnnnnnnnnnnnnnnnnnnnnnnnnnnnnnnnnnnnnnnnnnnnnnnnnnnnnnnnnnnnnnnnnnnnnnnnnnnnnnnnnnnnnnnnnnnnnnnnnnnnnnnnnnnnnnnnnnnnnnnnnnnnnnnnnnnnnnnnnnnnnnnnnnnnnnnnnnnnnnnnnnnnnnnnnnnnnnnnnnnnnnnnnnnnnnnnnnnnnnnnnnnnnnnnnnnnnnnnnnnnnnnnnnnnnnnnnnnnnnnnnnnnnnnnnnnnnnnnnnnnnnnnnnnnnnnnnnnnnnnnnnnnnnnnnnnnnnnnnnnnnnnnnnnnnnnnnnnnnnnnnnnnnnnnnnnnnnnnnnnnnnnnnnnnnnnnnnnnnnnnnnnnnnnnnnnnnnnnnnnnnnnnnnnnnnnnnnnnnnnnnnnnnnnnnnnnnnnnnnnnnnnnnnnnnnnnnnnnnnnnnnnnnnnnnnnnnnnnnnnnnnnnnnnnnnnnnnnnnnnnnnnnnnnnnnnnnnnnnnnnnnnnnnnnnnnnnnnnnnnnnnnnnnnnnnnnnnnnnnnnnnnnnnnnnnnnnnnnnnnnnnnnnnnnnnnnnnnnnnnnnnnnnnnnnnnnnnnnnnnnnnnnnnnnnnnnnnnnnnnnnnnnnnnnnnnnnnnnnnnnnnnnnnnnnnnnnnnnnnnnnnnnnnnnnnnnnnnnnnnnnnnnnnnnnnnnnnnnnnnnnnnnnnnnnnnnnnnnnnnnnnnnnnnnnnnnnnnnnnnnnnnnnnnnnnnnnnnnnnnnnnnnnnnnnnnnnnnnnnnnnnnnnnnnnnnnnnnnnnnnnnnnnnnnnnnnnnnnnnnnnnnnnnnnnnnnnnnnnnnnnnnnnnnnnnnnnnnnnnnnnnnnnnnnnnnnnnnnnnnnnnnnnnnnnnnnnnnnnnnnnnnnnnnnnnnnnnnnnnnnnnnnnnnnnnnnnnnnnnnnnnnnnnnnnnnnnnnnnnnnnnnnnnnnnnnnnnnnnnnnnnnnnnnnnnnnnnnnnnnnnnnnnnnnnnnnnnnnnnnnnnnnnnnnnnnnnnnnnnnnnnnnnnnnnnnnnnnnnnnnnnnnnnnnnnnnnnnnnnnnnnnnnnnnnnnnnnnnnnnnnnnnnnnnnnnnnnnnnnnnnnnnnnnnnnnnnnnnnnnnnnnnnnnnnnnnnnnnnnnnnnnnnnnnnnnnnnnnnnnnnnnnnnnnnnnnnnnnnnnnnnnnnnnnnnnnnnnnnnnnnnnnnnnnnnnnnnnnnnnnnnnnnnnnnnnnnnnnnnnnnnnnnnnnnnnnnnnnnnnnnnnnnnnnnnnnnnnnnnnnnnnnnnnnnnnnnnnnnnnnnnnnnnnnnnnnnnnnnnnnnnnnnnnnnnnnnnnnnnnnnnnnnnnnnnnnnnnnnnnnnnnnnnnnnnnnnnnnnnnnnnnnnnnnnnnnnnnnnnnnnnnnnnnnnnnnnnnnnnnnnnnnnnnnnnnnnnnnnnnnnnnnnnnnnnnnnnnnnnnnnnnnnnnnnnnnnnnnnnnnnnnnnnnnnnnnnnnnnnnnnnnnnnnnnnnnnnnnnnnnnnnnnnnnnnnnnnnnnnnnnnnnnnnnnnnnnnnnnnnnnnnnnnnnnnnnnnnnnnnnnnnnnnnnnnnnnnnnnnnnnnnnnnnnnnnnnnnnnnnnnnnnnnnnnnnnnnnnnnnnnnnnnnnnnnnnnnnnnnnnnnnnnnnnnnnnnnnnnnnnnnnnnnnnnnnnnnnnnnnnnnnnnnnnnnnnnnnnnnnnnnnnnnnnnnnnnnnnnnnnnnnnnnnnnnnnnnnnnnnnnnnnnnnnnnnnnnnnnnnnnnnnnnnnnnnnnnnnnnnnnnnnnnnnnnnnnnnnnnnnnnnnnnnnnnnnnnnnnnnnnnnnnnnnnnnnnnnnnnnnnnnnnnnnnnnnnnnnnnnnnnnnnnnnnnnnnnnnnnnnnnnnnnnnnnnnnnnnnnnnnnnnnnnnnnnnnnnnnnnnnnnnnnnnnnnnnnnnnnnnnnnnnnnnnnnnnnnnnnnnnnnnnnnnnnnnnnnnnnnnnnnnnnnnnnnnnnnnnnnnnnnnnnnnnnnnnnnnnnnnnnnnnnnnnnnnnnnnnnnnnnnnnnnnnnnnnnnnnnnnnnnnnnnnnnnnnnnnnnnnnnnnnnnnnnnnnnnnnnnnnnnnnnnnnnnnnnnnnnnnnnnnnnnnnnnnnnnnnnnnnnnnnnnnnnnnnnnnnnnnnnnnnnnnnnnnnnnnnnnnnnnnnnnnnnnnnnnnnnnnnnnnnnnnnnnnnnnnnnnnnnnnnnnnnnnnnnnnnnnnnnnnnnnnnnnnnnnnnnnnnnnnnnnnnnnnnnnnnnnnnnnnnnnnnnnnnnnnnnnnnnnnnnnnnnnnnnnnnnnnnnnnnnnnnnnnnnnnnnnnnnnnnnnnnnnnnnnnnnnnnnnnnnnnnnnnnnnnnnnnnnnnnnnnnnnnnnnnnnnnnnnnnnnnnnnnnnnnnnnnnnnnnnnnnnnnnnnnnnnnnnnnnnnnnnnnnnnnnnnnnnnnnnnnnnnnnnnnnnnnnnnnnnnnnnnnnnnnnnnnnnnnnnnnnnnnnnnnnnnnnnnnnnnnnnnnnnnnnnnnnnnnnnnnnnnnnnnnnnnnnnnnnnnnnnnnnnnnnnnnnnnnnnnnnnnnnnnnnnnnnnnnnnnnnnnnnnnnnnnnnnnnnnnnnnnnnnnnnnnnnnnnnnnnnnnnnnnnnnnnnnnnnnnnnnnnnnnnnnnnnnnnnnnnnnnnnnnnnnnnnnnnnnnnnnnnnnnnnnnnnnnnnnnnnnnnnnnnnnnnnnnnnnnnnnnnnnnnnnnnnnnnnnnnnnnnnnnnnnnnnnnnnnnnnnnnnnnnnnnnnnnnnnnnnnnnnnnnnnnnnnnnnnnnnnnnnnnnnnnnnnnnnnnnnnnnnnnnnnnnnnnnnnnnnnnnnnnnnnnnnnnnnnnnnnnnnnnnnnnnnnnnnnnnnnnnnnnnnnnnnnnnnnnnnnnnnnnnnnnnnnnnnnnnnnnnnnnnnnnnnnnnnnnnnnnnnnnnnnnnnnnnnnnnnnnnnnnnnnnnnnnnnnnnnnnnnnnnnnnnnnnnnnnnnnnnnnnnnnnnnnnnnnnnnnnnnnnnnnnnnnnnnnnnnnnnnnnnnnnnnnnnnnnnnnnnnnnnnnnnnnnnnnnnnnnnnnnnnnnnnnnnnnnnnnnnnnnnnnnnnnnnnnnnnnnnnnnnnnnnnnnnnnnnnnnnnnnnnnnnnnnnnnnnnnnnnnnnnnnnnnnnnnnnnnnnnnnnnnnnnnnnnnnnnnnnnnnnnnnnnnnnnnnnnnnnnnnnnnnnnnnnnnnnnnnnnnnnnnnnnnnnnnnnnnnnnnnnnnnnnnnnnnnnnnnnnnnnnnnnnnnnnnnnnnnnnnnnnnnnnnnnnnnnnnnnnnnnnnnnnnnnnnnnnnnnnnnnnnnnnnnnnnnnnnnnnnnnnnnnnnnnnnnnnnnnnnnnnnnnnnnnnnnnnnnnnnnnnnnnnnnnnnnnnnnnnnnnnnnnnnnnnnnnnnnnnnnnnnnnnnnnnnnnnnnnnnnnnnnnnnnnnnnnnnnnnnnnnnnnnnnnnnnnnnnnnnnnnnnnnnnnnnnnnnnnnnnnnnnnnnnnnnnnnnnnnnnnnnnnnnnnnnnnnnnnnnnnnnnnnnnnnnnnnnnnnnnnnnnnnnnnnnnnnnnnnnnnnnnnnnnnnnnnnnnnnnnnnnnnnnnnnnnnnnnnnnnnnnnnnnnnnnnnnnnnnnnnnnnnnnnnnnnnnnnnnnnnnnnnnnnnnnnnnnnnnnnnnnnnnnnnnnnnnnnnnnnnnnnnnnnnnnnnnnnnnnnnnnnnnnnnnnnnnnnnnnnnnnnnnnnnnnnnnnnnnnnnnnnnnnnnnnnnnnnnnnnnnnnnnnnnnnnnnnnnnnnnnnnnnnnnnnnnnnnnnnnnnnnnnnnnnnnnnnnnnnnnnnnnnnnnnnnnnnnnnnnnnnnnnnnnnnnnnnnnnnnnnnnnnnnnnnnnnnnnnnnnnnnnnnnnnnnnnnnnnnnnnnnnnnnnnnnnnnnnnnnnnnnnnnnnnnnnnnnnnnnnnnnnnnnnnnnnnnnnnnnnnnnnnnnnnnnnnnnnnnnnnnnnnnnnnnnnnnnnnnnnnnnnnnnnnnnnnnnnnnnnnnnnnnnnnnnnnnnnnnnnnnnnnnnnnnnnnnnnnnnnnnnnnnnnnnnnnnnnnnnnnnnnnnnnnnnnnnnnnnnnnnnnnnnnnnnnnnnnnnnnnnnnnnnnnnnnnnnnnnnnnnnnnnnnnnnnnnnnnnnnnnnnnnnnnnnnnnnnnnnnnnnnnnnnnnnnnnnnnnnnnnnnnnnnnnnnnnnnnnnnnnnnnnnnnnnnnnnnnnnnnnnnnnnnnnnnnnnnnnnnnnnnnnnnnnnnnnnnnnnnnnnnnnnnnnnnnnnnnnnnnnnnnnnnnnnnnnnnnnnnnnnnnnnnnnnnnnnnnnnnnnnnnnnnnnnnnnnnnnnnnnnnnnnnnnnnnnnnnnnnnnnnnnnnnnnnnnnnnnnnnnnnnnnnnnnnnnnnnnnnnnnnnnnnnnnnnnnnnnnnnnnnnnnnnnnnnnnnnnnnnnnnnnnnnnnnnnnnnnnnnnnnnnnnnnnnnnnnnnnnnnnnnnnnnnnnnnnnnnnnnnnnnnnnnnnnnnnnnnnnnnnnnnnnnnnnnnnnnnnnnnnnnnnnnnnnnnnnnnnnnnnnnnnnnnnnnnnnnnnnnnnnnnnnnnnnnnnnnnnnnnnnnnnnnnnnnnnnnnnnnnnnnnnnnnnnnnnnnnnnnnnnnnnnnnnnnnnnnnnnnnnnnnnnnnnnnnnnnnnnnnnnnnnnnnnnnnnnnnnnnnnnnnnnnnnnnnnnnnnnnnnnnnnnnnnnnnnnnnnnnnnnnnnnnnnnnnnnnnnnnnnnnnnnnnnnnnnnnnnnnnnnnnnnnnnnnnnnnnnnnnnnnnnnnnnnnnnnnnnnnnnnnnnnnnnnnnnnnnnnnnnnnnnnnnnnnnnnnnnnnnnnnnnnnnnnnnnnnnnnnnnnnnnnnnnnnnnnnnnnnnnnnnnnnnnnnnnnnnnnnnnnnnnnnnnnnnnnnnnnnnnnnnnnnnnnnnnnnnnnnnnnnnnnnnnnnnnnnnnnnnnnnnnnnnnnnnnnnnnnnnnnnnnnnnnnnnnnnnnnnnnnnnnnnnnnnnnnnnnnnnnnnnnnnnnnnnnnnnnnnnnnnnnnnnnnnnnnnnnnnnnnnnnnnnnnnnnnnnnnnnnnnnnnnnnnnnnnnnnnnnnnnnnnnnnnnnnnnnnnnnnnnnnnnnnnnnnnnnnnnnnnnnnnnnnnnnnnnnnnnnnnnnnnnnnnnnnnnnnnnnnnnnnnnnnnnnnnnnnnnnnnnnnnnnnnnnnnnnnnnnnnnnnnnnnnnnnnnnnnnnnnnnnnnnnnnnnnnnnnnnnnnnnnnnnnnnnnnnnnnnnnnnnnnnnnnnnnnnnnnnnnnnnnnnnnnnnnnnnnnnnnnnnnnnnnnnnnnnnnnnnnnnnnnnnnnnnnnnnnnnnnnnnnnnnnnnnnnnnnnnnnnnnnnnnnnnnnnnnnnnnnnnnnnnnnnnnnnnnnnnnnnnnnnnnnnnnnnnnnnnnnnnnnnnnnnnnnnnnnnnnnnnnnnnnnnnnnnnnnnnnnnnnnnnnnnnnnnnnnnnnnnnnnnnnnnnnnnnnnnnnnnnnnnnnnnnnnnnnnnnnnnnnnnnnnnnnnnnnnnnnnnnnnnnnnnnnnnnnnnnnnnnnnnnnnnnnnnnnnnnnnnnnnnnnnnnnnnnnnnnnnnnnnnnnnnnnnnnnnnnnnnnnnnnnnnnnnnnnnnnnnnnnnnnnnnnnnnnnnnnnnnnnnnnnnnnnnnnnnnnnnnnnnnnnnnnnnnnnnnnnnnnnnnnnnnnnnnnnnnnnnnnnnnnnnnnnnnnnnnnnnnnnnnnnnnnnnnnnnnnnnnnnnnnnnnnnnnnnnnnnnnnnnnnnnnnnnnnnnnnnnnnnnnnnnnnnnnnnnnnnnnnnnnnnnnnnnnnnnnnnnnnnnnnnnnnnnnnnnnnnnnnnnnnnnnnnnnnnnnnnnnnnnnnnnnnnnnnnnnnnnnnnnnnnnnnnnnnnnnnnnnnnnnnnnnnnnnnnnnnnnnnnnnnnnnnnnnnnnnnnnnnnnnnnnnnnnnnnnnnnnnnnnnnnnnnnnnnnnnnnnnnnnnnnnnnnnnnnnnnnnnnnnnnnnnnnnnnnnnnnnnnnnnnnnnnnnnnnnnnnnnnnnnnnnnnnnnnnnnnnnnnnnnnnnnnnnnnnnnnnnnnnnnnnnnnnnnnnnnnnnnnnnnnnnnnnnnnnnnnnnnnnnnnnnnnnnnnnnnnnnnnnnnnnnnnnnnnnnnnnnnnnnnnnnnnnnnnnnnnnnnnnnnnnnnnnnnnnnnnnnnnnnnnnnnnnnnnnnnnnnnnnnnnnnnnnnnnnnnnnnnnnnnnnnnnnnnnnnnnnnnnnnnnnnnnnnnnnnnnnnnnnnnnnnnnnnnnnnnnnnnnnnnnnnnnnnnnnnnnnnnnnnnnnnnnnnnnnnnnnnnnnnnnnnnnnnnnnnnnnnnnnnnnnnnnnnnnnnnnnnnnnnnnnnnnnnnnnnnnnnnnnnnnnnnnnnnnnnnnnnnnnnnnnnnnnnnnnnnnnnnnnnnnnnnnnnnnnnnnnnnnnnnnnnnnnnnnnnnnnnnnnnnnnnnnnnnnnnnnnnnnnnnnnnnnnnnnnnnnnnnnnnnnnnnnnnnnnnnnnnnnnnnnnnnnnnnnnnnnnnnnnnnnnnnnnnnnnnnnnnnnnnnnnnnnnnnnnnnnnnnnnnnnnnnnnnnnnnnnnnnnnnnnnnnnnnnnnnnnnnnnnnnnnnnnnnnnnnnnnnnnnnnnnnnnnnnnnnnnnnnnnnnnnnnnnnnnnnnnnnnnnnnnnnnnnnnnnnnnnnnnnnnnnnnnnnnnnnnnnnnnnnnnnnnnnnnnnnnnnnnnnnnnnnnnnnnnnnnnnnnnnnnnnnnnnnnnnnnnnnnnnnnnnnnnnnnnnnnnnnnnnnnnnnnnnnnnnnnnnnnnnnnnnnnnnnnnnnnnnnnnnnnnnnnnnnnnnnnnnnnnnnnnnnnnnnnnnnnnnnnnnnnnnnnnnnnnnnnnnnnnnnnnnnnnnnnnnnnnnnnnnnnnnnnnnnnnnnnnnnnnnnnnnnnnnnnnnnnnnnnnnnnnnnnnnnnnnnnnnnnnnnnnnnnnnnnnnnnnnnnnnnnnnnnnnnnnnnnnnnnnnnnnnnnnnnnnnnnnnnnnnnnnnnnnnnnnnnnnnnnnnnnnnnnnnnnnnnnnnnnnnnnnnnnnnnnnnnnnnnnnnnnnnnnnnnnnnnnnnnnnnnnnnnnnnnnnnnnnnnnnnnnnnnnnnnnnnnnnnnnnnnnnnnnnnnnnnnnnnnnnnnnnnnnnnnnnnnnnnnnnnnnnnnnnnnnnnnnnnnnnnnnnnnnnnnnnnnnnnnnnnnnnnnnnnnnnnnnnnnnnnnnnnnnnnnnnnnnnnnnnnnnnnnnnnnnnnnnnnnnnnnnnnnnnnnnnnnnnnnnnnnnnnnnnnnnnnnnnnnnnnnnnnnnnnnnnnnnnnnnnnnnnnnnnnnnnnnnnnnnnnnnnnnnnnnnnnnnnnnnnnnnnnnnnnnnnnnnnnnnnnnnnnnnnnnnnnnnnnnnnnnnnnnnnnnnnnnnnnnnnnnnnnnnnnnnnnnnnnnnnnnnnnnnnnnnnnnnnnnnnnnnnnnnnnnnnnnnnnnnnnnnnnnnnnnnnnnnnnnnnnnnnnnnnnnnnnnnnnnnnnnnnnnnnnnnnnnnnnnnnnnnnnnnnnnnnnnnnnnnnnnnnnnnnnnnnnnnnnnnnnnnnnnnnnnnnnnnnnnnnnnnnnnnnnnnnnnnnnnnnnnnnnnnnnnnnnnnnnnnnnnnnnnnnnnnnnnnnnnnnnnnnnnnnnnnnnnnnnnnnnnnnnnnnnnnnnnnnnnnnnnnnnnnnnnnnnnnnnnnnnnnnnnnnnnnnnnnnnnnnnnnnnnnnnnnnnnnnnnnnnnnnnnnnnnnnnnnnnnnnnnnnnnnnnnnnnnnnnnnnnnnnnnnnnnnnnnnnnnnnnnnnnnnnnnnnnnnnnnnnnnnnnnnnnnnnnnnnnnnnnnnnnnnnnnnnnnnnnnnnnnnnnnnnnnnnnnnnnnnnnnnnnnnnnnnnnnnnnnnnnnnnnnnnnnnnnnnnnnnnnnnnnnnnnnnnnnnnnnnnnnnnnnnnnnnnnnnnnnnnnnnnnnnnnnnnnnnnnnnnnnnnnnnnnnnnnnnnnnnnnnnnnnnnnnnnnnnnnnnnnnnnnnnnnnnnnnnnnnnnnnnnnnnnnnnnnnnnnnnnnnnnnnnnnnnnnnnnnnnnnnnnnnnnnnnnnnnnnnnnnnnnnnnnnnnnnnnnnnnnnnnnnnnnnnnnnnnnnnnnnnnnnnnnnnnnnnnnnnnnnnnnnnnnnnnnnnnnnnnnnnnnnnnnnnnnnnnnnnnnnnnnnnnnnnnnnnnnnnnnnnnnnnnnnnnnnnnnnnnnnnnnnnnnnnnnnnnnnnnnnnnnnnnnnnnnnnnnnnnnnnnnnnnnnnnnnnnnnnnnnnnnnnnnnnnnnnnnnnnnnnnnnnnnnnnnnnnnnnnnnnnnnnnnnnnnnnnnnnnnnnnnnnnnnnnnnnnnnnnnnnnnnnnnnnnnnnnnnnnnnnnnnnnnnnnnnnnnnnnnnnnnnnnnnnnnnnnnnnnnnnnnnnnnnnnnnnnnnnnnnnnnnnnnnnnnnnnnnnnnnnnnnnnnnnnnnnnnnnnnnnnnnnnnnnnnnnnnnnnnnnnnnnnnnnnnnnnnnnnnnnnnnnnnnnnnnnnnnnnnnnnnnnnnnnnnnnnnnnnnnnnnnnnnnnnnnnnnnnnnnnnnnnnnnnnnnnnnnnnnnnnnnnnnnnnnnnnnnnnnnnnnnnnnnnnnnnnnnnnnnnnnnnnnnnnnnnnnnnnnnnnnnnnnnnnnnnnnnnnnnnnnnnnnnnnnnnnnnnnnnnnnnnnnnnnnnnnnnnnnnnnnnnnnnnnnnnnnnnnnnnnnnnnnnnnnnnnnnnnnnnnnnnnnnnnnnnnnnnnnnnnnnnnnnnnnnnnnnnnnnnnnnnnnnnnnnnnnnnnnnnnnnnnnnnnnnnnnnnnnnnnnnnnnnnnnnnnnnnnnnnnnnnnnnnnnnnnnnnnnnnnnnnnnnnnnnnnnnnnnnnnnnnnnnnnnnnnnnnnnnnnnnnnnnnnnnnnnnnnnnnnnnnnnnnnnnnnnnnnnnnnnnnnnnnnnnnnnnnnnnnnnnnnnnnnnnnnnnnnnnnnnnnnnnnnnnnnnnnnnnnnnnnnnnnnnnnnnnnnnnnnnnnnnnnnnnnnnnnnnnnnnnnnnnnnnnnnnnnnnnnnnnnnnnnnnnnnnnnnnnnnnnnnnnnnnnnnnnnnnnnnnnnnnnnnnnnnnnnnnnnnnnnnnnnnnnnnnnnnnnnnnnnnnnnnnnnnnnnnnnnnnnnnnnnnnnnnnnnnnnnnnnnnnnnnnnnnnnnnnnnnnnnnnnnnnnnnnnnnnnnnnnnnnnnnnnnnnnnnnnnnnnnnnnnnnnnnnnnnnnnnnnnnnnnnnnnnnnnnnnnnnnnnnnnnnnnnnnnnnnnnnnnnnnnnnnnnnnnnnnnnnnnnnnnnnnnnnnnnnnnnnnnnnnnnnnnnnnnnnnnnnnnnnnnnnnnnnnnnnnnnnnnnnnnnnnnnnnnnnnnnnnnnnnnnnnnnnnnnnnnnnnnnnnnnnnnnnnnnnnnnnnnnnnnnnnnnnnnnnnnnnnnnnnnnnnnnnnnnnnnnnnnnnnnnnnnnnnnnnnnnnnnnnnnnnnnnnnnnnnnnnnnnnnnnnnnnnnnnnnnnnnnnnnnnnnnnnnnnnnnnnnnnnnnnnnnnnnnnnnnnnnnnnnnnnnnnnnnnnnnnnnnnnnnnnnnnnnnnnnnnnnnnnnnnnnnnnnnnnnnnnnnnnnnnnnnnnnnnnnnnnnnnnnnnnnnnnnnnnnnnnnnnnnnnnnnnnnnnnnnnnnnnnnnnnnnnnnnnnnnnnnnnnnnnnnnnnnnnnnnnnnnnnnnnnnnnnnnnnnnnnnnnnnnnnnnnnnnnnnnnnnnnnnnnnnnnnnnnnnnnnnnnnnnnnnnnnnnnnnnnnnnnnnnnnnnnnnnnnnnnnnnnnnnnnnnnnnnnnnnnnnnnnnnnnnnnnnnnnnnnnnnnnnnnnnnnnnnnnnnnnnnnnnnnnnnnnnnnnnnnnnnnnnnnnnnnnnnnnnnnnnnnnnnnnnnnnnnnnnnnnnnnnnnnnnnnnnnnnnnnnnnnnnnnnnnnnnnnnnnnnnnnnnnnnnnnnnnnnnnnnnnnnnnnnnnnnnnnnnnnnnnnnnnnnnnnnnnnnnnnnnnnnnnnnnnnnnnnnnnnnnnnnnnnnnnnnnnnnnnnnnnnnnnnnnnnnnnnnnnnnnnnnnnnnnnnnnnnnnnnnnnnnnnnnnnnnnnnnnnnnnnnnnnnnnnnnnnnnnnnnnnnnnnnnnnnnnnnnnnnnnnnnnnnnnnnnnnnnnnnnnnnnnnnnnnnnnnnnnnnnnnnnnnnnnnnnnnnnnnnnnnnnnnnnnnnnnnnnnnnnnnnnnnnnnnnnnnnnnnnnnnnnnnnnnnnnnnnnnnnnnnnnnnnnnnnnnnnnnnnnnnnnnnnnnnnnnnnnnnnnnnnnnnnnnnnnnnnnnnnnnnnnnnnnnnnnnnnnnnnnnnnnnnnnnnnnnnnnnnnnnnnnnnnnnnnnnnnnnnnnnnnnnnnnnnnnnnnnnnnnnnnnnnnnnnnnnnnnnnnnnnnnnnnnnnnnnnnnnnnnnnnnnnnnnnnnnnnnnnnnnnnnnnnnnnnnnnnnnnnnnnnnnnnnnnnnnnnnnnnnnnnnnnnnnnnnnnnnnnnnnnnnnnnnnnnnnnnnnnnnnnnnnnnnnnnnnnnnnnnnnnnnnnnnnnnnnnnnnnnnnnnnnnnnnnnnnnnnnnnnnnnnnnnnnnnnnnnnnnnnnnnnnnnnnnnnnnnnnnnnnnnnnnnnnnnnnnnnnnnnnnnnnnnnnnnnnnnnnnnnnnnnnnnnnnnnnnnnnnnnnnnnnnnnnnnnnnnnnnnnnnnnnnnnnnnnnnnnnnnnnnnnnnnnnnnnnnnnnnnnnnnnnnnnnnnnnnnnnnnnnnnnnnnnnnnnnnnnnnnnnnnnnnnnnnnnnnnnnnnnnnnnnnnnnnnnnnnnnnnnnnnnnnnnnnnnnnnnnnnnnnnnnnnnnnnnnnnnnnnnnnnnnnnnnnnnnnnnnnnnnnnnnnnnnnnnnnnnnnnnnnnnnnnnnnnnnnnnnnnnnnnnnnnnnnnnnnnnnnnnnnnnnnnnnnnnnnnnnnnnnnnnnnnnnnnnnnnnnnnnnnnnnnnnnnnnnnnnnnnnnnnnnnnnnnnnnnnnnnnnnnnnnnnnnnnnnnnnnnnnnnnnnnnnnnnnnnnnnnnnnnnnnnnnnnnnnnnnnnnnnnnnnnnnnnnnnnnnnnnnnnnnnnnnnnnnnnnnnnnnnnnnnnnnnnnnnnnnnnnnnnnnnnnnnnnnnnnnnnnnnnnnnnnnnnnnnnnnnnnnnnnnnnnnnnnnnnnnnnnnnnnnnnnnnnnnnnnnnnnnnnnnnnnnnnnnnnnnnnnnnnnnnnnnnnnnnnnnnnnnnnnnnnnnnnnnnnnnnnnnnnnnnnnnnnnnnnnnnnnnnnnnnnnnnnnnnnnnnnnnnnnnnnnnnnnnnnnnnnnnnnnnnnnnnnnnnnnnnnnnnnnnnnnnnnnnnnnnnnnnnnnnnnnnnnnnnnnnnnnnnnnnnnnnnnnnnnnnnnnnnnnnnnnnnnnnnnnnnnnnnnnnnnnnnnnnnnnnnnnnnnnnnnnnnnnnnnnnnnnnnnnnnnnnnnnnnnnnnnnnnnnnnnnnnnnnnnnnnnnnnnnnnnnnnnnnnnnnnnnnnnnnnnnnnnnnnnnnnnnnnnnnnnnnnnnnnnnnnnnnnnnnnnnnnnnnnnnnnnnnnnnnnnnnnnnnnnnnnnnnnnnnnnnnnnnnnnnnnnnnnnnnnnnnnnnnnnnnnnnnnnnnnnnnnnnnnnnnnnnnnnnnnnnnnnnnnnnnnnnnnnnnnnnnnnnnnnnnnnnnnnnnnnnnnnnnnnnnnnnnnnnnnnnnnnnnnnnnnnnnnnnnnnnnnnnnnnnnnnnnnnnnnnnnnnnnnnnnnnnnnnnnnnnnnnnnnnnnnnnnnnnnnnnnnnnnnnnnnnnnnnnnnnnnnnnnnnnnnnnnnnnnnnnnnnnnnnnnnnnnnnnnnnnnnnnnnnnnnnnnnnnnnnnnnnnnnnnnnnnnnnnnnnnnnnnnnnnnnnnnnnnnnnnnnnnnnnnnnnnnnnnnnnnnnnnnnnnnnnnnnnnnnnnnnnnnnnnnnnnnnnnnnnnnnnnnnnnnnnnnnnnnnnnnnnnnnnnnnnnnnnnnnnnnnnnnnnnnnnnnnnnnnnnnnnnnnnnnnnnnnnnnnnnnnnnnnnnnnnnnnnnnnnnnnnnnnnnnnnnnnnnnnnnnnnnnnnnnnnnnnnnnnnnnnnnnnnnnnnnnnnnnnnnnnnnnnnnnnnnnnnnnnnnnnnnnnnnnnnnnnnnnnnnnnnnnnnnnnnnnnnnnnnnnnnnnnnnnnnnnnnnnnnnnnnnnnnnnnnnnnnnnnnnnnnnnnnnnnnnnnnnnnnnnnnnnnnnnnnnnnnnnnnnnnnnnnnnnnnnnnnnnnnnnnnnnnnnnnnnnnnnnnnnnnnnnnnnnnnnnnnnnnnnnnnnnnnnnnnnnnnnnnnnnnnnnnnnnnnnnnnnnnnnnnnnnnnnnnnnnnnnnnnnnnnnnnnnnnnnnnnnnnnnnnnnnnnnnnnnnnnnnnnnnnnnnnnnnnnnnnnnnnnnnnnnnnnnnnnnnnnnnnnnnnnnnnnnnnnnnnnnnnnnnnnnnnnnnnnnnnnnnnnnnnnnnnnnnnnnnnnnnnnnnnnnnnnnnnnnnnnnnnnnnnnnnnnnnnnnnnnnnnnnnnnnnnnnnnnnnnnnnnnnnnnnnnnnnnnnnnnnnnnnnnnnnnnnnnnnnnnnnnnnnnnnnnnnnnnnnnnnnnnnnnnnnnnnnnnnnnnnnnnnnnnnnnnnnnnnnnnnnnnnnnnnnnnnnnnnnnnnnnnnnnnnnnnnnnnnnnnnnnnnnnnnnnnnnnnnnnnnnnnnnnnnnnnnnnnnnnnnnnnnnnnnnnnnnnnnnnnnnnnnnnnnnnnnnnnnnnnnnnnnnnnnnnnnnnnnnnnnnnnnnnnnnnnnnnnnnnnnnnnnnnnnnnnnnnnnnnnnnnnnnnnnnnnnnnnnnnnnnnnnnnnnnnnnnnnnnnnnnnnnnnnnnnnnnnnnnnnnnnnnnnnnnnnnnnnnnnnnnnnnnnnnnnnnnnnnnnnnnnnnnnnnnnnnnnnnnnnnnnnnnnnnnnnnnnnnnnnnnnnnnnnnnnnnnnnnnnnnnnnnnnnnnnnnnnnnnnnnnnnnnnnnnnnnnnnnnnnnnnnnnnnnnnnnnnnnnnnnnnnnnnnnnnnnnnnnnnnnnnnnnnnnnnnnnnnnnnnnnnnnnnnnnnnnnnnnnnnnnnnnnnnnnnnnnnnnnnnnnnnnnnnnnnnnnnnnnnnnnnnnnnnnnnnnnnnnnnnnnnnnnnnnnnnnnnnnnnnnnnnnnnnnnnnnnnnnnnnnnnnnnnnnnnnnnnnnnnnnnnnnnnnnnnnnnnnnnnnnnnnnnnnnnnnnnnnnnnnnnnnnnnnnnnnnnnnnnnnnnnnnnnnnnnnnnnnnnnnnnnnnnnnnnnnnnnnnnnnnnnnnnnnnnnnnnnnnnnnnnnnnnnnnnnnnnnnnnnnnnnnnnnnnnnnnnnnnnnnnnnnnnnnnnnnnnnnnnnnnnnnnnnnnnnnnnnnnnnnnnnnnnnnnnnnnnnnnnnnnnnnnnnnnnnnnnnnnnnnnnnnnnnnnnnnnnnnnnnnnnnnnnnnnnnnnnnnnnnnnnnnnnnnnnnnnnnnnnnnnnnnnnnnnnnnnnnnnnnnnnnnnnnnnnnnnnnnnnnnnnnnnnnnnnnnnnnnnnnnnnnnnnnnnnnnnnnnnnnnnnnnnnnnnnnnnnnnnnnnnnnnnnnnnnnnnnnnnnnnnnnnnnnnnnnnnnnnnnnnnnnnnnnnnnnnnnnnnnnnnnnnnnnnnnnnnnnnnnnnnnnnnnnnnnnnnnnnnnnnnnnnnnnnnnnnnnnnnnnnnnnnnnnnnnnnnnnnnnnnnnnnnnnnnnnnnnnnnnnnnnnnnnnnnnnnnnnnnnnnnnnnnnnnnnnnnnnnnnnnnnnnnnnnnnnnnnnnnnnnnnnnnnnnnnnnnnnnnnnnnnnnnnnnnnnnnnnnnnnnnnnnnnnnnnnnnnnnnnnnnnnnnnnnnnnnnnnnnnnnnnnnnnnnnnnnnnnnnnnnnnnnnnnnnnnnnnnnnnnnnnnnnnnnnnnnnnnnnnnnnnnnnnnnnnnnnnnnnnnnnnnnnnnnnnnnnnnnnnnnnnnnnnnnnnnnnnnnnnnnnnnnnnnnnnnnnnnnnnnnnnnnnnnnnnnnnnnnnnnnnnnnnnnnnnnnnnnnnnnnnnnnnnnnnnnnnnnnnnnnnnnnnnnnnnnnnnnnnnnnnnnnnnnnnnnnnnnnnnnnnnnnnnnnnnnnnnnnnnnnnnnnnnnnnnnnnnnnnnnnnnnnnnnnnnnnnnnnnnnnnnnnnnnnnnnnnnnnnnnnnnnnnnnnnnnnnnnnnnnnnnnnnnnnnnnnnnnnnnnnnnnnnnnnnnnnnnnnnnnnnnnnnnnnnnnnnnnnnnnnnnnnnnnnnnnnnnnnnnnnnnnnnnnnnnnnnnnnnnnnnnnnnnnnnnnnnnnnnnnnnnnnnnnnnnnnnnnnnnnnnnnnnnnnnnnnnnnnnnnnnnnnnnnnnnnnnnnnnnnnnnnnnnnnnnnnnnnnnnnnnnnnnnnnnnnnnnnnnnnnnnnnnnnnnnnnnnnnnnnnnnnnnnnnnnnnnnnnnnnnnnnnnnnnnnnnnnnnnnnnnnnnnnnnnnnnnnnnnnnnnnnnnnnnnnnnnnnnnnnnnnnnnnnnnnnnnnnnnnnnnnnnnnnnnnnnnnnnnnnnnnnnnnnnnnnnnnnnnnnnnnnnnnnnnnnnnnnnnnnnnnnnnnnnnnnnnnnnnnnnnnnnnnnnnnnnnnnnnnnnnnnnnnnnnnnnnnnnnnnnnnnnnnnnnnnnnnnnnnnnnnnnnnnnnnnnnnnnnnnnnnnnnnnnnnnnnnnnnnnnnnnnnnnnnnnnnnnnnnnnnnnnnnnnnnnnnnnnnnnnnnnnnnnnnnnnnnnnnnnnnnnnnnnnnnnnnnnnnnnnnnnnnnnnnnnnnnnnnnnnnnnnnnnnnnnnnnnnnnnnnnnnnnnnnnnnnnnnnnnnnnnnnnnnnnnnnnnnnnnnnnnnnnnnnnnnnnnnnnnnnnnnnnnnnnnnnnnnnnnnnnnnnnnnnnnnnnnnnnnnnnnnnnnnnnnnnnnnnnnnnnnnnnnnnnnnnnnnnnnnnnnnnnnnnnnnnnnnnnnnnnnnnnnnnnnnnnnnnnnnnnnnnnnnnnnnnnnnnnnnnnnnnnnnnnnnnnnnnnnnnnnnnnnnnnnnnnnnnnnnnnnnnnnnnnnnnnnnnnnnnnnnnnnnnnnnnnnnnnnnnnnnnnnnnnnnnnnnnnnnnnnnnnnnnnnnnnnnnnnnnnnnnnnnnnnnnnnnnnnnnnnnnnnnnnnnnnnnnnnnnnnnnnnnnnnnnnnnnnnnnnnnnnnnnnnnnnnnnnnnnnnnnnnnnnnnnnnnnnnnnnnnnnnnnnnnnnnnnnnnnnnnnnnnnnnnnnnnnnnnnnnnnnnnnnnnnnnnnnnnnnnnnnnnnnnnnnnnnnnnnnnnnnnnnnnnnnnnnnnnnnnnnnnnnnnnnnnnnnnnnnnnnnnnnnnnnnnnnnnnnnnnnnnnnnnnnnnnnnnnnnnnnnnnnnnnnnnnnnnnnnnnnnnnnnnnnnnnnnnnnnnnnnnnnnnnnnnnnnnnnnnnnnnnnnnnnnnnnnnnnnnnnnnnnnnnnnnnnnnnnnnnnnnnnnnnnnnnnnnnnnnnnnnnnnnnnnnnnnnnnnnnnnnnnnnnnnnnnnnnnnnnnnnnnnnnnnnnnnnnnnnnnnnnnnnnnnnnnnnnnnnnnnnnnnnnnnnnnnnnnnnnnnnnnnnnnnnnnnnnnnnnnnnnnnnnnnnnnnnnnnnnnnnnnnnnnnnnnnnnnnnnnnnnnnnnnnnnnnnnnnnnnnnnnnnnnnnnnnnnnnnnnnnnnnnnnnnnnnnnnnnnnnnnnnnnnnnnnnnnnnnnnnnnnnnnnnnnnnnnnnnnnnnnnnnnnnnnnnnnnnnnnnnnnnnnnnnnnnnnnnnnnnnnnnnnnnnnnnnnnnnnnnnnnnnnnnnnnnnnnnnnnnnnnnnnnnnnnnnnnnnnnnnnnnnnnnnnnnnnnnnnnnnnnnnnnnnnnnnnnnnnnnnnnnnnnnnnnnnnnnnnnnnnnnnnnnnnnnnnnnnnnnnnnnnnnnnnnnnnnnnnnnnnnnnnnnnnnnnnnnnnnnnnnnnnnnnnnnnnnnnnnnnnnnnnnnnnnnnnnnnnnnnnnnnnnnnnnnnnnnnnnnnnnnnnnnnnnnnnnnnnnnnnnnnnnnnnnnnnnnnnnnnnnnnnnnnnnnnnnnnnnnnnnnnnnnnnnnnnnnnnnnnnnnnnnnnnnnnnnnnnnnnnnnnnnnnnnnnnnnnnnnnnnnnnnnnnnnnnnnnnnnnnnnnnnnnnnnnnnnnnnnnnnnnnnnnnnnnnnnnnnnnnnnnnnnnnnnnnnnnnnnnnnnnnnnnnnnnnnnnnnnnnnnnnnnnnnnnnnnnnnnnnnnnnnnnnnnnnnnnnnnnnnnnnnnnnnnnnnnnnnnnnnnnnnnnnnnnnnnnnnnnnnnnnnnnnnnnnnnnnnnnnnnnnnnnnnnnnnnnnnnnnnnnnnnnnnnnnnnnnnnnnnnnnnnnnnnnnnnnnnnnnnnnnnnnnnnnnnnnnnnnnnnnnnnnnnnnnnnnnnnnnnnnnnnnnnnnnnnnnnnnnnnnnnnnnnnnnnnnnnnnnnnnnnnnnnnnnnnnnnnnnnnnnnnnnnnnnnnnnnnnnnnnnnnnnnnnnnnnnnnnnnnnnnnnnnnnnnnnnnnnnnnnnnnnnnnnnnnnnnnnnnnnnnnnnnnnnnnnnnnnnnnnnnnnnnnnnnnnnnnnnnnnnnnnnnnnnnnnnnnnnnnnnnnnnnnnnnnnnnnnnnnnnnnnnnnnnnnnnnnnnnnnnnnnnnnnnnnnnnnnnnnnnnnnnnnnnnnnnnnnnnnnnnnnnnnnnnnnnnnnnnnnnnnnnnnnnnnnnnnnnnnnnnnnnnnnnnnnnnnnnnnnnnnnnnnnnnnnnnnnnnnnnnnnnnnnnnnnnnnnnnnnnnnnnnnnnnnnnnnnnnnnnnnnnnnnnnnnnnnnnnnnnnnnnnnnnnnnnnnnnnnnnnnnnnnnnnnnnnnnnnnnnnnnnnnnnnnnnnnnnnnnnnnnnnnnnnnnnnnnnnnnnnnnnnnnnnnnnnnnnnnnnnnnnnnnnnnnnnnnnnnnnnnnnnnnnnnnnnnnnnnnnnnnnnnnnnnnnnnnnnnnnnnnnnnnnnnnnnnnnnnnnnnnnnnnnnnnnnnnnnnnnnnnnnnnnnnnnnnnnnnnnnnnnnnnnnnnnnnnnnnnnnnnnnnnnnnnnnnnnnnnnnnnnnnnnnnnnnnnnnnnnnnnnnnnnnnnnnnnnnnnnnnnnnnnnnnnnnnnnnnnnnnnnnnnnnnnnnnnnnnnnnnnnnnnnnnnnnnnnnnnnnnnnnnnnnnnnnnnnnnnnnnnnnnnnnnnnnnnnnnnnnnnnnnnnnnnnnnnnnnnnnnnnnnnnnnnnnnnnnnnnnnnnnnnnnnnnnnnnnnnnnnnnnnnnnnnnnnnnnnnnnnnnnnnnnnnnnnnnnnnnnnnnnnnnnnnnnnnnnnnnnnnnnnnnnnnnnnnnnnnnnnnnnnnnnnnnnnnnnnnnnnnnnnnnnnnnnnnnnnnnnnnnnnnnnnnnnnnnnnnnnnnnnnnnnnnnnnnnnnnnnnnnnnnnnnnnnnnnnnnnnnnnnnnnnnnnnnnnnnnnnnnnnnnnnnnnnnnnnnnnnnnnnnnnnnnnnnnnnnnnnnnnnnnnnnnnnnnnnnnnnnnnnnnnnnnnnnnnnnnnnnnnnnnnnnnnnnnnnnnnnnnnnnnnnnnnnnnnnnnnnnnnnnnnnnnnnnnnnnnnnnnnnnnnnnnnnnnnnnnnnnnnnnnnnnnnnnnnnnnnnnnnnnnnnnnnnnnnnnnnnnnnnnnnnnnnnnnnnnnnnnnnnnnnnnnnnnnnnnnnnnnnnnnnnnnnnnnnnnnnnnnnnnnnnnnnnnnnnnnnnnnnnnnnnnnnnnnnnnnnnnnnnnnnnnnnnnnnnnnnnnnnnnnnnnnnnnnnnnnnnnnnnnnnnnnnnnnnnnnnnnnnnnnnnnnnnnnnnnnnnnnnnnnnnnnnnnnnnnnnnnnnnnnnnnnnnnnnnnnnnnnnnnnnnnnnnnnnnnnnnnnnnnnnnnnnnnnnnnnnnnnnnnnnnnnnnnnnnnnnnnnnnnnnnnnnnnnnnnnnnnnnnnnnnnnnnnnnnnnnnnnnnnnnnnnnnnnnnnnnnnnnnnnnnnnnnnnnnnnnnnnnnnnnnnnnnnnnnnnnnnnnnnnnnnnnnnnnnnnnnnnnnnnnnnnnnnnnnnnnnnnnnnnnnnnnnnnnnnnnnnnnnnnnnnnnnnnnnnnnnnnnnnnnnnnnnnnnnnnnnnnnnnnnnnnnnnnnnnnnnnnnnnnnnnnnnnnnnnnnnnnnnnnnnnnnnnnnnnnnnnnnnnnnnnnnnnnnnnnnnnnnnnnnnnnnnnnnnnnnnnnnnnnnnnnnnnnnnnnnnnnnnnnnnnnnnnnnnnnnnnnnnnnnnnnnnnnnnnnnnnnnnnnnnnnnnnnnnnnnnnnnnnnnnnnnnnnnnnnnnnnnnnnnnnnnnnnnnnnnnnnnnnnnnnnnnnnnnnnnnnnnnnnnnnnnnnnnnnnnnnnnnnnnnnnnnnnnnnnnnnnnnnnnnnnnnnnnnnnnnnnnnnnnnnnnnnnnnnnnnnnnnnnnnnnnnnnnnnnnnnnnnnnnnnnnnnnnnnnnnnnnnnnnnnnnnnnnnnnnnnnnnnnnnnnnnnnnnnnnnnnnnnnnnnnnnnnnnnnnnnnnnnnnnnnnnnnnnnnnnnnnnnnnnnnnnnnnnnnnnnnnnnnnnnnnnnnnnnnnnnnnnnnnnnnnnnnnnnnnnnnnnnnnnnnnnnnnnnnnnnnnnnnnnnnnnnnnnnnnnnnnnnnnnnnnnnnnnnnnnnnnnnnnnnnnnnnnnnnnnnnnnnnnnnnnnnnnnnnnnnnnnnnnnnnnnnnnnnnnnnnnnnnnnnnnnnnnnnnnnnnnnnnnnnnnnnnnnnnnnnnnnnnnnnnnnnnnnnnnnnnnnnnnnnnnnnnnnnnnnnnnnnnnnnnnnnnnnnnnnnnnnnnnnnnnnnnnnnnnnnnnnnnnnnnnnnnnnnnnnnnnnnnnnnnnnnnnnnnnnnnnnnnnnnnnnnnnnnnnnnnnnnnnnnnnnnnnnnnnnnnnnnnnnnnnnnnnnnnnnnnnnnnnnnnnnnnnnnnnnnnnnnnnnnnnnnnnnnnnnnnnnnnnnnnnnnnnnnnnnnnnnnnnnnnnnnnnnnnnnnnnnnnnnnnnnnnnnnnnnnnnnnnnnnnnnnnnnnnnnnnnnnnnnnnnnnnnnnnnnnnnnnnnnnnnnnnnnnnnnnnnnnnnnnnnnnnnnnnnnnnnnnnnnnnnnnnnnnnnnnnnnnnnnnnnnnnnnnnnnnnnnnnnnnnnnnnnnnnnnnnnnnnnnnnnnnnnnnnnnnnnnnnnnnnnnnnnnnnnnnnnnnnnnnnnnnnnnnnnnnnnnnnnnnnnnnnnnnnnnnnnnnnnnnnnnnnnnnnnnnnnnnnnnnnnnnnnnnnnnnnnnnnnnnnnnnnnnnnnnnnnnnnnnnnnnnnnnnnnnnnnnnnnnnnnnnnnnnnnnnnnnnnnnnnnnnnnnnnnnnnnnnnnnnnnnnnnnnnnnnnnnnnnnnnnnnnnnnnnnnnnnnnnnnnnnnnnnnnnnnnnnnnnnnnnnnnnnnnnnnnnnnnnnnnnnnnnnnnnnnnnnnnnnnnnnnnnnnnnnnnnnnnnnnnnnnnnnnnnnnnnnnnnnnnnnnnnnnnnnnnnnnnnnnnnnnnnnnnnnnnnnnnnnnnnnnnnnnnnnnnnnnnnnnnnnnnnnnnnnnnnnnnnnnnnnnnnnnnnnnnnnnnnnnnnnnnnnnnnnnnnnnnnnnnnnnnnnnnnnnnnnnnnnnnnnnnnnnnnnnnnnnnnnnnnnnnnnnnnnnnnnnnnnnnnnnnnnnnnnnnnnnnnnnnnnnnnnnnnnnnnnnnnnnnnnnnnnnnnnnnnnnnnnnnnnnnnnnnnnnnnnnnnnnnnnnnnnnnnnnnnnnnnnnnnnnnnnnnnnnnnnnnnnnnnnnnnnnnnnnnnnnnnnnnnnnnnnnnnnnnnnnnnnnnnnnnnnnnnnnnnnnnnnnnnnnnnnnnnnnnnnnnnnnnnnnnnnnnnnnnnnnnnnnnnnnnnnnnnnnnnnnnnnnnnnnnnnnnnnnnnnnnnnnnnnnnnnnnnnnnnnnnnnnnnnnnnnnnnnnnnnnnnnnnnnnnnnnnnnnnnnnnnnnnnnnnnnnnnnnnnnnnnnnnnnnnnnnnnnnnnnnnnnnnnnnnnnnnnnnnnnnnnnnnnnnnnnnnnnnnnnnnnnnnnnnnnnnnnnnnnnnnnnnnnnnnnnnnnnnnnnnnnnnnnnnnnnnnnnnnnnnnnnnnnnnnnnnnnnnnnnnnnnnnnnnnnnnnnnnnnnnnnnnnnnnnnnnnnnnnnnnnnnnnnnnnnnnnnnnnnnnnnnnnnnnnnnnnnnnnnnnnnnnnnnnnnnnnnnnnnnnnnnnnnnnnnnnnnnnnnnnnnnnnnnnnnnnnnnnnnnnnnnnnnnnnnnnnnnnnnnnnnnnnnnnnnnnnnnnnnnnnnnnnnnnnnnnnnnnnnnnnnnnnnnnnnnnnnnnnnnnnnnnnnnnnnnnnnnnnnnnnnnnnnnnnnnnnnnnnnnnnnnnnnnnnnnnnnnnnnnnnnnnnnnnnnnnnnnnnnnnnnnnnnnnnnnnnnnnnnnnnnnnnnnnnnnnnnnnnnnnnnnnnnnnnnnnnnnnnnnnnnnnnnnnnnnnnnnnnnnnnnnnnnnnnnnnnnnnnnnnnnnnnnnnnnnnnnnnnnnnnnnnnnnnnnnnnnnnnnnnnnnnnnnnnnnnnnnnnnnnnnnnnnnnnnnnnnnnnnnnnnnnnnnnnnnnnnnnnnnnnnnnnnnnnnnnnnnnnnnnnnnnnnnnnnnnnnnnnnnnnnnnnnnnnnnnnnnnnnnnnnnnnnnnnnnnnnnnnnnnnnnnnnnnnnnnnnnnnnnnnnnnnnnnnnnnnnnnnnnnnnnnnnnnnnnnnnnnnnnnnnnnnnnnnnnnnnnnnnnnnnnnnnnnnnnnnnnnnnnnnnnnnnnnnnnnnnnnnnnnnnnnnnnnnnnnnnnnnnnnnnnnnnnnnnnnnnnnnnnnnnnnnnnnnnnnnnnnnnnnnnnnnnnnnnnnnnnnnnnnnnnnnnnnnnnnnnnnnnnnnnnnnnnnnnnnnnnnnnnnnnnnnnnnnnnnnnnnnnnnnnnnnnnnnnnnnnnnnnnnnnnnnnnnnnnnnnnnnnnnnnnnnnnnnnnnnnnnnnnnnnnnnnnnnnnnnnnnnnnnnnnnnnnnnnnnnnnnnnnnnnnnnnnnnnnnnnnnnnnnnnnnnnnnnnnnnnnnnnnnnnnnnnnnnnnnnnnnnnnnnnnnnnnnnnnnnnnnnnnnnnnnnnnnnnnnnnnnnnnnnnnnnnnnnnnnnnnnnnnnnnnnnnnnnnnnnnnnnnnnnnnnnnnnnnnnnnnnnnnnnnnnnnnnnnnnnnnnnnnnnnnnnnnnnnnnnnnnnnnnnnnnnnnnnnnnnnnnnnnnnnnnnnnnnnnnnnnnnnnnnnnnnnnnnnnnnnnnnnnnnnnnnnnnnnnnnnnnnnnnnnnnnnnnnnnnnnnnnnnnnnnnnnnnnnnnnnnnnnnnnnnnnnnnnnnnnnnnnnnnnnnnnnnnnnnnnnnnnnnnnnnnnnnnnnnnnnnnnnnnnnnnnnnnnnnnnnnnnnnnnnnnnnnnnnnnnnnnnnnnnnnnnnnnnnnnnnnnnnnnnnnnnnnnnnnnnnnnnnnnnnnnnnnnnnnnnnnnnnnnnnnnnnnnnnnnnnnnnnnnnnnnnnnnnnnnnnnnnnnnnnnnnnnnnnnnnnnnnnnnnnnnnnnnnnnnnnnnnnnnnnnnnnnnnnnnnnnnnnnnnnnnnnnnnnnnnnnnnnnnnnnnnnnnnnnnnnnnnnnnnnnnnnnnnnnnnnnnnnnnnnnnnnnnnnnnnnnnnnnnnnnnnnnnnnnnnnnnnnnnnnnnnnnnnnnnnnnnnnnnnnnnnnnnnnnnnnnnnnnnnnnnnnnnnnnnnnnnnnnnnnnnnnnnnnnnnnnnnnnnnnnnnnnnnnnnnnnnnnnnnnnnnnnnnnnnnnnnnnnnnnnnnnnnnnnnnnnnnnnnnnnnnnnnnnnnnnnnnnnnnnnnnnnnnnnnnnnnnnnnnnnnnnnnnnnnnnnnnnnnnnnnnnnnnnnnnnnnnnnnnnnnnnnnnnnnnnnnnnnnnnnnnnnnnnnnnnnnnnnnnnnnnnnnnnnnnnnnnnnnnnnnnnnnnnnnnnnnnnnnnnnnnnnnnnnnnnnnnnnnnnnnnnnnnnnnnnnnnnnnnnnnnnnnnnnnnnnnnnnnnnnnnnnnnnnnnnnnnnnnnnnnnnnnnnnnnnnnnnnnnnnnnnnnnnnnnnnnnnnnnnnnnnnnnnnnnnnnnnnnnnnnnnnnnnnnnnnnnnnnnnnnnnnnnnnnnnnnnnnnnnnnnnnnnnnnnnnnnnnnnnnnnnnnnnnnnnnnnnnnnnnnnnnnnnnnnnnnnnnnnnnnnnnnnnnnnnnnnnnnnnnnnnnnnnnnnnnnnnnnnnnnnnnnnnnnnnnnnnnnnnnnnnnnnnnnnnnnnnnnnnnnnnnnnnnnnnnnnnnnnnnnnnnnnnnnnnnnnnnnnnnnnnnnnnnnnnnnnnnnnnnnnnnnnnnnnnnnnnnnnnnnnnnnnnnnnnnnnnnnnnnnnnnnnnnnnnnnnnnnnnnnnnnnnnnnnnnnnnnnnnnnnnnnnnnnnnnnnnnnnnnnnnnnnnnnnnnnnnnnnnnnnnnnnnnnnnnnnnnnnnnnnnnnnnnnnnnnnnnnnnnnnnnnnnnnnnnnnnnnnnnnnnnnnnnnnnnnnnnnnnnnnnnnnnnnnnnnnnnnnnnnnnnnnnnnnnnnnnnnnnnnnnnnnnnnnnnnnnnnnnnnnnnnnnnnnnnnnnnnnnnnnnnnnnnnnnnnnnnnnnnnnnnnnnnnnnnnnnnnnnnnnnnnnnnnnnnnnnnnnnnnnnnnnnnnnnnnnnnnnnnnnnnnnnnnnnnnnnnnnnnnnnnnnnnnnnnnnnnnnnnnnnnnnnnnnnnnnnnnnnnnnnnnnnnnnnnnnnnnnnnnnnnnnnnnnnnnnnnnnnnnnnnnnnnnnnnnnnnnnnnnnnnnnnnnnnnnnnnnnnnnnnnnnnnnnnnnnnnnnnnnnnnnnnnnnnnnnnnnnnnnnnnnnnnnnnnnnnnnnnnnnnnnnnnnnnnnnnnnnnnnnnnnnnnnnnnnnnnnnnnnnnnnnnnnnnnnnnnnnnnnnnnnnnnnnnnnnnnnnnnnnnnnnnnnnnnnnnnnnnnnnnnnnnnnnnnnnnnnnnnnnnnnnnnnnnnnnnnnnnnnnnnnnnnnnnnnnnnnnnnnnnnnnnnnnnnnnnnnnnnnnnnnnnnnnnnnnnnnnnnnnnnnnnnnnnnnnnnnnnnnnnnnnnnnnnnnnnnnnnnnnnnnnnnnnnnnnnnnnnnnnnnnnnnnnnnnnnnnnnnnnnnnnnnnnnnnnnnnnnnnnnnnnnnnnnnnnnnnnnnnnnnnnnnnnnnnnnnnnnnnnnnnnnnnnnnnnnnnnnnnnnnnnnnnnnnnnnnnnnnnnnnnnnnnnnnnnnnnnnnnnnnnnnnnnnnnnnnnnnnnnnnnnnnnnnnnnnnnnnnnnnnnnnnnnnnnnnnnnnnnnnnnnnnnnnnnnnnnnnnnnnnnnnnnnnnnnnnnnnnnnnnnnnnnnnnnnnnnnnnnnnnnnnnnnnnnnnnnnnnnnnnnnnnnnnnnnnnnnnnnnnnnnnnnnnnnnnnnnnnnnnnnnnnnnnnnnnnnnnnnnnnnnnnnnnnnnnnnnnnnnnnnnnnnnnnnnnnnnnnnnnnnnnnnnnnnnnnnnnnnnnnnnnnnnnnnnnnnnnnnnnnnnnnnnnnnnnnnnnnnnnnnnnnnnnnnnnnnnnnnnnnnnnnnnnnnnnnnnnnnnnnnnnnnnnnnnnnnnnnnnnnnnnnnnnnnnnnnnnnnnnnnnnnnnnnnnnnnnnnnnnnnnnnnnnnnnnnnnnnnnnnnnnnnnnnnnnnnnnnnnnnnnnnnnnnnnnnnnnnnnnnnnnnnnnnnnnnnnnnnnnnnnnnnnnnnnnnnnnnnnnnnnnnnnnnnnnnnnnnnnnnnnnnnnnnnnnnnnnnnnnnnnnnnnnnnnnnnnnnnnnnnnnnnnnnnnnnnnnnnnnnnnnnnnnnnnnnnnnnnnnnnnnnnnnnnnnnnnnnnnnnnnnnnnnnnnnnnnnnnnnnnnnnnnnnnnnnnnnnnnnnnnnnnnnnnnnnnnnnnnnnnnnnnnnnnnnnnnnnnnnnnnnnnnnnnnnnnnnnnnnnnnnnnnnnnnnnnnnnnnnnnnnnnnnnnnnnnnnnnnnnnnnnnnnnnnnnnnnnnnnnnnnnnnnnnnnnnnnnnnnnnnnnnnnnnnnnnnnnnnnnnnnnnnnnnnnnnnnnnnnnnnnnnnnnnnnnnnnnnnnnnnnnnnnnnnnnnnnnnnnnnnnnnnnnnnnnnnnnnnnnnnnnnnnnnnnnnnnnnnnnnnnnnnnnnnnnnnnnnnnnnnnnnnnnnnnnnnnnnnnnnnnnnnnnnnnnnnnnnnnnnnnnnnnnnnnnnnnnnnnnnnnnnnnnnnnnnnnnnnnnnnnnnnnnnnnnnnnnnnnnnnnnnnnnnnnnnnnnnnnnnnnnnnnnnnnnnnnnnnnnnnnnnnnnnnnnnnnnnnnnnnnnnnnnnnnnnnnnnnnnnnnnnnnnnnnnnnnnnnnnnnnnnnnnnnnnnnnnnnnnnnnnnnnnnnnnnnnnnnnnnnnnnnnnnnnnnnnnnnnnnnnnnnnnnnnnnnnnnnnnnnnnnnnnnnnnnnnnnnnnnnnnnnnnnnnnnnnnnnnnnnnnnnnnnnnnnnnnnnnnnnnnnnnnnnnnnnnnnnnnnnnnnnnnnnnnnnnnnnnnnnnnnnnnnnnnnnnnnnnnnnnnnnnnnnnnnnnnnnnnnnnnnnnnnnnnnnnnnnnnnnnnnnnnnnnnnnnnnnnnnnnnnnnnnnnnnnnnnnnnnnnnnnnnnnnnnnnnnnnnnnnnnnnnnnnnnnnnnnnnnnnnnnnnnnnnnnnnnnnnnnnnnnnnnnnnnnnnnnnnnnnnnnnnnnnnnnnnnnnnnnnnnnnnnnnnnnnnnnnnnnnnnnnnnnnnnnnnnnnnnnnnnnnnnnnnnnnnnnnnnnnnnnnnnnnnnnnnnnnnnnnnnnnnnnnnnnnnnnnnnnnnnnnnnnnnnnnnnnnnnnnnnnnnnnnnnnnnnnnnnnnnnnnnnnnnnnnnnnnnnnnnnnnnnnnnnnnnnnnnnnnnnnnnnnnnnnnnnnnnnnnnnnnnnnnnnnnnnnnnnnnnnnnnnnnnnnnnnnnnnnnnnnnnnnnnnnnnnnnnnnnnnnnnnnnnnnnnnnnnnnnnnnnnnnnnnnnnnnnnnnnnnnnnnnnnnnnnnnnnnnnnnnnnnnnnnnnnnnnnnnnnnnnnnnnnnnnnnnnnnnnnnnnnnnnnnnnnnnnnnnnnnnnnnnnnnnnnnnnnnnnnnnnnnnnnnnnnnnnnnnnnnnnnnnnnnnnnnnnnnnnnnnnnnnnnnnnnnnnnnnnnnnnnnnnnnnnnnnnnnnnnnnnnnnnnnnnnnnnnnnnnnnnnnnnnnnnnnnnnnnnnnnnnnnnnnnnnnnnnnnnnnnnnnnnnnnnnnnnnnnnnnnnnnnnnnnnnnnnnnnnnnnnnnnnnnnnnnnnnnnnnnnnnnnnnnnnnnnnnnnnnnnnnnnnnnnnnnnnnnnnnnnnnnnnnnnnnnnnnnnnnnnnnnnnnnnnnnnnnnnnnnnnnnnnnnnnnnnnnnnnnnnnnnnnnnnnnnnnnnnnnnnnnnnnnnnnnnnnnnnnnnnnnnnnnnnnnnnnnnnnnnnnnnnnnnnnnnnnnnnnnnnnnnnnnnnnnnnnnnnnnnnnnnnnnnnnnnnnnnnnnnnnnnnnnnnnnnnnnnnnnnnnnnnnnnnnnnnnnnnnnnnnnnnnnnnnnnnnnnnnnnnnnnnnnnnnnnnnnnnnnnnnnnnnnnnnnnnnnnnnnnnnnnnnnnnnnnnnnnnnnnnnnnnnnnnnnnnnnnnnnnnnnnnnnnnnnnnnnnnnnnnnnnnnnnnnnnnnnnnnnnnnnnnnnnnnnnnnnnnnnnnnnnnnnnnnnnnnnnnnnnnnnnnnnnnnnnnnnnnnnnnnnnnnnnnnnnnnnnnnnnnnnnnnnnnnnnnnnnnnnnnnnnnnnnnnnnnnnnnnnnnnnnnnnnnnnnnnnnnnnnnnnnnnnnnnnnnnnnnnnnnnnnnnnnnnnnnnnnnnnnnnnnnnnnnnnnnnnnnnnnnnnnnnnnnnnnnnnnnnnnnnnnnnnnnnnnnnnnnnnnnnnnnnnnnnnnnnnnnnnnnnnnnnnnnnnnnnnnnnnnnnnnnnnnnnnnnnnnnnnnnnnnnnnnnnnnnnnnnnnnnnnnnnnnnnnnnnnnnnnnnnnnnnnnnnnnnnnnnnnnnnnnnnnnnnnnnnnnnnnnnnnnnnnnnnnnnnnnnnnnnnnnnnnnnnnnnnnnnnnnnnnnnnnnnnnnnnnnnnnnnnnnnnnnnnnnnnnnnnnnnnnnnnnnnnnnnnnnnnnnnnnnnnnnnnnnnnnnnnnnnnnnnnnnnnnnnnnnnnnnnnnnnnnnnnnnnnnnnnnnnnnnnnnnnnnnnnnnnnnnnnnnnnnnnnnnnnnnnnnnnnnnnnnnnnnnnnnnnnnnnnnnnnnnnnnnnnnnnnnnnnnnnnnnnnnnnnnnnnnnnnnnnnnnnnnnnnnnnnnnnnnnnnnnnnnnnnnnnnnnnnnnnnnnnnnnnnnnnnnnnnnnnnnnnnnnnnnnnnnnnnnnnnnnnnnnnnnnnnnnnnnnnnnnnnnnnnnnnnnnnnnnnnnnnnnnnnnnnnnnnnnnnnnnnnnnnnnnnnnnnnnnnnnnnnnnnnnnnnnnnnnnnnnnnnnnnnnnnnnnnnnnnnnnnnnnnnnnnnnnnnnnnnnnnnnnnnnnnnnnnnnnnnnnnnnnnnnnnnnnnnnnnnnnnnnnnnnnnnnnnnnnnnnnnnnnnnnnnnnnnnnnnnnnnnnnnnnnnnnnnnnnnnnnnnnnnnnnnnnnnnnnnnnnnnnnnnnnnnnnnnnnnnnnnnnnnnnnnnnnnnnnnnnnnnnnnnnnnnnnnnnnnnnnnnnnnnnnnnnnnnnnnnnnnnnnnnnnnnnnnnnnnnnnnnnnnnnnnnnnnnnnnnnnnnnnnnnnnnnnnnnnnnnnnnnnnnnnnnnnnnnnnnnnnnnnnnnnnnnnnnnnnnnnnnnnnnnnnnnnnnnnnnnnnnnnnnnnnnnnnnnnnnnnnnnnnnnnnnnnnnnnnnnnnnnnnnnnnnnnnnnnnnnnnnnnnnnnnnnnnnnnnnnnnnnnnnnnnnnnnnnnnnnnnnnnnnnnnnnnnnnnnnnnnnnnnnnnnnnnnnnnnnnnnnnnnnnnnnnnnnnnnnnnnnnnnnnnnnnnnnnnnnnnnnnnnnnnnnnnnnnnnnnnnnnnnnnnnnnnnnnnnnnnnnnnnnnnnnnnnnnnnnnnnnnnnnnnnnnnnnnnnnnnnnnnnnnnnnnnnnnnnnnnnnnnnnnnnnnnnnnnnnnnnnnnnnnnnnnnnnnnnnnnnnnnnnnnnnnnnnnnnnnnnnnnnnnnnnnnnnnnnnnnnnnnnnnnnnnnnnnnnnnnnnnnnnnnnnnnnnnnnnnnnnnnnnnnnnnnnnnnnnnnnnnnnnnnnnnnnnnnnnnnnnnnnnnnnnnnnnnnnnnnnnnnnnnnnnnnnnnnnnnnnnnnnnnnnnnnnnnnnnnnnnnnnnnnnnnnnnnnnnnnnnnnnnnnnnnnnnnnnnnnnnnnnnnnnnnnnnnnnnnnnnnnnnnnnnnnnnnnnnnnnnnnnnnnnnnnnnnnnnnnnnnnnnnnnnnnnnnnnnnnnnnnnnnnnnnnnnnnnnnnnnnnnnnnnnnnnnnnnnnnnnnnnnnnnnnnnnnnnnnnnnnnnnnnnnnnnnnnnnnnnnnnnnnnnnnnnnnnnnnnnnnnnnnnnnnnnnnnnnnnnnnnnnnnnnnnnnnnnnnnnnnnnnnnnnnnnnnnnnnnnnnnnnnnnnnnnnnnnnnnnnnnnnnnnnnnnnnnnnnnnnnnnnnnnnnnnnnnnnnnnnnnnnnnnnnnnnnnnnnnnnnnnnnnnnnnnnnnnnnnnnnnnnnnnnnnnnnnnnnnnnnnnnnnnnnnnnnnnnnnnnnnnnnnnnnnnnnnnnnnnnnnnnnnnnnnnnnnnnnnnnnnnnnnnnnnnnnnnnnnnnnnnnnnnnnnnnnnnnnnnnnnnnnnnnnnnnnnnnnnnnnnnnnnnnnnnnnnnnnnnnnnnnnnnnnnnnnnnnnnnnnnnnnnnnnnnnnnnnnnnnnnnnnnnnnnnnnnnnnnnnnnnnnnnnnnnnnnnnnnnnnnnnnnnnnnnnnnnnnnnnnnnnnnnnnnnnnnnnnnnnnnnnnnnnnnnnnnnnnnnnnnnnnnnnnnnnnnnnnnnnnnnnnnnnnnnnnnnnnnnnnnnnnnnnnnnnnnnnnnnnnnnnnnnnnnnnnnnnnnnnnnnnnnnnnnnnnnnnnnnnnnnnnnnnnnnnnnnnnnnnnnnnnnnnnnnnnnnnnnnnnnnnnnnnnnnnnnnnnnnnnnnnnnnnnnnnnnnnnnnnnnnnnnnnnnnnnnnnnnnnnnnnnnnnnnnnnnnnnnnnnnnnnnnnnnnnnnnnnnnnnnnnnnnnnnnnnnnnnnnnnnnnnnnnnnnnnnnnnnnnnnnnnnnnnnnnnnnnnnnnnnnnnnnnnnnnnnnnnnnnnnnnnnnnnnnnnnnnnnnnnnnnnnnnnnnnnnnnnnnnnnnnnnnnnnnnnnnnnnnnnnnnnnnnnnnnnnnnnnnnnnnnnnnnnnnnnnnnnnnnnnnnnnnnnnnnnnnnnnnnnnnnnnnnnnnnnnnnnnnnnnnnnnnnnnnnnnnnnnnnnnnnnnnnnnnnnnnnnnnnnnnnnnnnnnnnnnnnnnnnnnnnnnnnnnnnnnnnnnnnnnnnnnnnnnnnnnnnnnnnnnnnnnnnnnnnnnnnnnnnnnnnnnnnnnnnnnnnnnnnnnnnnnnnnnnnnnnnnnnnnnnnnnnnnnnnnnnnnnnnnnnnnnnnnnnnnnnnnnnnnnnnnnnnnnnnnnnnnnnnnnnnnnnnnnnnnnnnnnnnnnnnnnnnnnnnnnnnnnnnnnnnnnnnnnnnnnnnnnnnnnnnnnnnnnnnnnnnnnnnnnnnnnnnnnnnnnnnnnnnnnnnnnnnnnnnnnnnnnnnnnnnnnnnnnnnnnnnnnnnnnnnnnnnnnnnnnnnnnnnnnnnnnnnnnnnnnnnnnnnnnnnnnnnnnnnnnnnnnnnnnnnnnnnnnnnnnnnnnnnnnnnnnnnnnnnnnnnnnnnnnnnnnnnnnnnnnnnnnnnnnnnnnnnnnnnnnnnnnnnnnnnnnnnnnnnnnnnnnnnnnnnnnnnnnnnnnnnnnnnnnnnnnnnnnnnnnnnnnnnnnnnnnnnnnnnnnnnnnnnnnnnnnnnnnnnnnnnnnnnnnnnnnnnnnnnnnnnnnnnnnnnnnnnnnnnnnnnnnnnnnnnnnnnnnnnnnnnnnnnnnnnnnnnnnnnnnnnnnnnnnnnnnnnnnnnnnnnnnnnnnnnnnnnnnnnnnnnnnnnnnnnnnnnnnnnnnnnnnnnnnnnnnnnnnnnnnnnnnnnnnnnnnnnnnnnnnnnnnnnnnnnnnnnnnnnnnnnnnnnnnnnnnnnnnnnnnnnnnnnnnnnnnnnnnnnnnnnnnnnnnnnnnnnnnnnnnnnnnnnnnnnnnnnnnnnnnnnnnnnnnnnnnnnnnnnnnnnnnnnnnnnnnnnnnnnnnnnnnnnnnnnnnnnnnnnnnnnnnnnnnnnnnnnnnnnnnnnnnnnnnnnnnnnnnnnnnnnnnnnnnnnnnnnnnnnnnnnnnnnnnnnnnnnnnnnnnnnnnnnnnnnnnnnnnnnnnnnnnnnnnnnnnnnnnnnnnnnnnnnnnnnnnnnnnnnnnnnnnnnnnnnnnnnnnnnnnnnnnnnnnnnnnnnnnnnnnnnnnnnnnnnnnnnnnnnnnnnnnnnnnnnnnnnnnnnnnnnnnnnnnnnnnnnnnnnnnnnnnnnnnnnnnnnnnnnnnnnnnnnnnnnnnnnnnnnnnnnnnnnnnnnnnnnnnnnnnnnnnnnnnnnnnnnnnnnnnnnnnnnnnnnnnnnnnnnnnnnnnnnnnnnnnnnnnnnnnnnnnnnnnnnnnnnnnnnnnnnnnnnnnnnnnnnnnnnnnnnnnnnnnnnnnnnnnnnnnnnnnnnnnnnnnnnnnnnnnnnnnnnnnnnnnnnnnnnnnnnnnnnnnnnnnnnnnnnnnnnnnnnnnnnnnnnnnnnnnnnnnnnnnnnnnnnnnnnnnnnnnnnnnnnnnnnnnnnnnnnnnnnnnnnnnnnnnnnnnnnnnnnnnnnnnnnnnnnnnnnnnnnnnnnnnnnnnnnnnnnnnnnnnnnnnnnnnnnnnnnnnnnnnnnnnnnnnnnnnnnnnnnnnnnnnnnnnnnnnnnnnnnnnnnnnnnnnnnnnnnnnnnnnnnnnnnnnnnnnnnnnnnnnnnnnnnnnnnnnnnnnnnnnnnnnnnnnnnnnnnnnnnnnnnnnnnnnnnnnnnnnnnnnnnnnnnnnnnnnnnnnnnnnnnnnnnnnnnnnnnnnnnnnnnnnnnnnnnnnnnnnnnnnnnnnnnnnnnnnnnnnnnnnnnnnnnnnnnnnnnnnnnnnnnnnnnnnnnnnnnnnnnnnnnnnnnnnnnnnnnnnnnnnnnnnnnnnnnnnnnnnnnnnnnnnnnnnnnnnnnnnnnnnnnnnnnnnnnnnnnnnnnnnnnnnnnnnnnnnnnnnnnnnnnnnnnnnnnnnnnnnnnnnnnnnnnnnnnnnnnnnnnnnnnnnnnnnnnnnnnnnnnnnnnnnnnnnnnnnnnnnnnnnnnnnnnnnnnnnnnnnnnnnnnnnnnnnnnnnnnnnnnnnnnnnnnnnnnnnnnnnnnnnnnnnnnnnnnnnnnnnnnnnnnnnnnnnnnnnnnnnnnnnnnnnnnnnnnnnnnnnnnnnnnnnnnnnnnnnnnnnnnnnnnnnnnnnnnnnnnnnnnnnnnnnnnnnnnnnnnnnnnnnnnnnnnnnnnnnnnnnnnnnnnnnnnnnnnnnnnnnnnnnnnnnnnnnnnnnnnnnnnnnnnnnnnnnnnnnnnnnnnnnnnnnnnnnnnnnnnnnnnnnnnnnnnnnnnnnnnnnnnnnnnnnnnnnnnnnnnnnnnnnnnnnnnnnnnnnnnnnnnnnnnnnnnnnnnnnnnnnnnnnnnnnnnnnnnnnnnnnnnnnnnnnnnnnnnnnnnnnnnnnnnnnnnnnnnnnnnnnnnnnnnnnnnnnnnnnnnnnnnnnnnnnnnnnnnnnnnnnnnnnnnnnnnnnnnnnnnnnnnnnnnnnnnnnnnnnnnnnnnnnnnnnnnnnnnnnnnnnnnnnnnnnnnnnnnnnnnnnnnnnnnnnnnnnnnnnnnnnnnnnnnnnnnnnnnnnnnnnnnnnnnnnnnnnnnnnnnnnnnnnnnnnnnnnnnnnnnnnnnnnnnnnnnnnnnnnnnnnnnnnnnnnnnnnnnnnnnnnnnnnnnnnnnnnnnnnnnnnnnnnnnnnnnnnnnnnnnnnnnnnnnnnnnnnnnnnnnnnnnnnnnnnnnnnnnnnnnnnnnnnnnnnnnnnnnnnnnnnnnnnnnnnnnnnnnnnnnnnnnnnnnnnnnnnnnnnnnnnnnnnnnnnnnnnnnnnnnnnnnnnnnnnnnnnnnnnnnnnnnnnnnnnnnnnnnnnnnnnnnnnnnnnnnnnnnnnnnnnnnnnnnnnnnnnnnnnnnnnnnnnnnnnnnnnnnnnnnnnnnnnnnnnnnnnnnnnnnnnnnnnnnnnnnnnnnnnnnnnnnnnnnnnnnnnnnnnnnnnnnnnnnnnnnnnnnnnnnnnnnnnnnnnnnnnnnnnnnnnnnnnnnnnnnnnnnnnnnnnnnnnnnnnnnnnnnnnnnnnnnnnnnnnnnnnnnnnnnnnnnnnnnnnnnnnnnnnnnnnnnnnnnnnnnnnnnnnnnnnnnnnnnnnnnnnnnnnnnnnnnnnnnnnnnnnnnnnnnnnnnnnnnnnnnnnnnnnnnnnnnnnnnnnnnnnnnnnnnnnnnnnnnnnnnnnnnnnnnnnnnnnnnnnnnnnnnnnnnnnnnnnnnnnnnnnnnnnnnnnnnnnnnnnnnnnnnnnnnnnnnnnnnnnnnnnnnnnnnnnnnnnnnnnnnnnnnnnnnnnnnnnnnnnnnnnnnnnnnnnnnnnnnnnnnnnnnnnnnnnnnnnnnnnnnnnnnnnnnnnnnnnnnnnnnnnnnnnnnnnnnnnnnnnnnnnnnnnnnnnnnnnnnnnnnnnnnnnnnnnnnnnnnnnnnnnnnnnnnnnnnnnnnnnnnnnnnnnnnnnnnnnnnnnnnnnnnnnnnnnnnnnnnnnnnnnnnnnnnnnnnnnnnnnnnnnnnnnnnnnnnnnnnnnnnnnnnnnnnnnnnnnnnnnnnnnnnnnnnnnnnnnnnnnnnnnnnnnnnnnnnnnnnnnnnnnnnnnnnnnnnnnnnnnnnnnnnnnnnnnnnnnnnnnnnnnnnnnnnnnnnnnnnnnnnnnnnnnnnnnnnnnnnnnnnnnnnnnnnnnnnnnnnnnnnnnnnnnnnnnnnnnnnnnnnnnnnnnnnnnnnnnnnnnnnnnnnnnnnnnnnnnnnnnnnnnnnnnnnnnnnnnnnnnnnnnnnnnnnnnnnnnnnnnnnnnnnnnnnnnnnnnnnnnnnnnnnnnnnnnnnnnnnnnnnnnnnnnnnnnnnnnnnnnnnnnnnnnnnnnnnnnnnnnnnnnnnnnnnnnnnnnnnnnnnnnnnnnnnnnnnnnnnnnnnnnnnnnnnnnnnnnnnnnnnnnnnnnnnnnnnnnnnnnnnnnnnnnnnnnnnnnnnnnnnnnnnnnnnnnnnnnnnnnnnnnnnnnnnnnnnnnnnnnnnnnnnnnnnnnnnnnnnnnnnnnnnnnnnnnnnnnnnnnnnnnnnnnnnnnnnnnnnnnnnnnnnnnnnnnnnnnnnnnnnnnnnnnnnnnnnnnnnnnnnnnnnnnnnnnnnnnnnnnnnnnnnnnnnnnnnnnnnnnnnnnnnnnnnnnnnnnnnnnnnnnnnnnnnnnnnnnnnnnnnnnnnnnnnnnnnnnnnnnnnnnnnnnnnnnnnnnnnnnnnnnnnnnnnnnnnnnnnnnnnnnnnnnnnnnnnnnnnnnnnnnnnnnnnnnnnnnnnnnnnnnnnnnnnnnnnnnnnnnnnnnnnnnnnnnnnnnnnnnnnnnnnnnnnnnnnnnnnnnnnnnnnnnnnnnnnnnnnnnnnnnnnnnnnnnnnnnnnnnnnnnnnnnnnnnnnnnnnnnnnnnnnnnnnnnnnnnnnnnnnnnnnnnnnnnnnnnnnnnnnnnnnnnnnnnnnnnnnnnnnnnnnnnnnnnnnnnnnnnnnnnnnnnnnnnnnnnnnnnnnnnnnnnnnnnnnnnnnnnnnnnnnnnnnnnnnnnnnnnnnnnnnnnnnnnnnnnnnnnnnnnnnnnnnnnnnnnnnnnnnnnnnnnnnnnnnnnnnnnnnnnnnnnnnnnnnnnnnnnnnnnnnnnnnnnnnnnnnnnnnnnnnnnnnnnnnnnnnnnnnnnnnnnnnnnnnnnnnnnnnnnnnnnnnnnnnnnnnnnnnnnnnnnnnnnnnnnnnnnnnnnnnnnnnnnnnnnnnnnnnnnnnnnnnnnnnnnnnnnnnnnnnnnnnnnnnnnnnnnnnnnnnnnnnnnnnnnnnnnnnnnnnnnnnnnnnnnnnnnnnnnnnnnnnnnnnnnnnnnnnnnnnnnnnnnnnnnnnnnnnnnnnnnnnnnnnnnnnnnnnnnnnnnnnnnnnnnnnnnnnnnnnnnnnnnnnnnnnnnnnnnnnnnnnnnnnnnnnnnnnnnnnnnnnnnnnnnnnnnnnnnnnnnnnnnnnnnnnnnnnnnnnnnnnnnnnnnnnnnnnnnnnnnnnnnnnnnnnnnnnnnnnnnnnnnnnnnnnnnnnnnnnnnnnnnnnnnnnnnnnnnnnnnnnnnnnnnnnnnnnnnnnnnnnnnnnnnnnnnnnnnnnnnnnnnnnnnnnnnnnnnnnnnnnnnnnnnnnnnnnnnnnnnnnnnnnnnnnnnnnnnnnnnnnnnnnnnnnnnnnnnnnnnnnnnnnnnnnnnnnnnnnnnnnnnnnnnnnnnnnnnnnnnnnnnnnnnnnnnnnnnnnnnnnnnnnnnnnnnnnnnnnnnnnnnnnnnnnnnnnnnnnnnnnnnnnnnnnnnnnnnnnnnnnnnnnnnnnnnnnnnnnnnnnnnnnnnnnnnnnnnnnnnnnnnnnnnnnnnnnnnnnnnnnnnnnnnnnnnnnnnnnnnnnnnnnnnnnnnnnnnnnnnnnnnnnnnnnnnnnnnnnnnnnnnnnnnnnnnnnnnnnnnnnnnnnnnnnnnnnnnnnnnnnnnnnnnnnnnnnnnnnnnnnnnnnnnnnnnnnnnnnnnnnnnnnnnnnnnnnnnnnnnnnnnnnnnnnnnnnnnnnnnnnnnnnnnnnnnnnnnnnnnnnnnnnnnnnnnnnnnnnnnnnnnnnnnnnnnnnnnnnnnnnnnnnnnnnnnnnnnnnnnnnnnnnnnnnnnnnnnnnnnnnnnnnnnnnnnnnnnnnnnnnnnnnnnnnnnnnnnnnnnnnnnnnnnnnnnnnnnnnnnnnnnnnnnnnnnnnnnnnnnnnnnnnnnnnnnnnnnnnnnnnnnnnnnnnnnnnnnnnnnnnnnnnnnnnnnnnnnnnnnnnnnnnnnnnnnnnnnnnnnnnnnnnnnnnnnnnnnnnnnnnnnnnnnnnnnnnnnnnnnnnnnnnnnnnnnnnnnnnnnnnnnnnnnnnnnnnnnnnnnnnnnnnnnnnnnnnnnnnnnnnnnnnnnnnnnnnnnnnnnnnnnnnnnnnnnnnnnnnnnnnnnnnnnnnnnnnnnnnnnnnnnnnnnnnnnnnnnnnnnnnnnnnnnnnnnnnnnnnnnnnnnnnnnnnnnnnnnnnnnnnnnnnnnnnnnnnnnnnnnnnnnnnnnnnnnnnnnnnnnnnnnnnnnnnnnnnnnnnnnnnnnnnnnnnnnnnnnnnnnnnnnnnnnnnnnnnnnnnnnnnnnnnnnnnnnnnnnnnnnnnnnnnnnnnnnnnnnnnnnnnnnnnnnnnnnnnnnnnnnnnnnnnnnnnnnnnnnnnnnnnnnnnnnnnnnnnnnnnnnnnnnnnnnnnnnnnnnnnnnnnnnnnnnnnnnnnnnnnnnnnnnnnnnnnnnnnnnnnnnnnnnnnnnnnnnnnnnnnnnnnnnnnnnnnnnnnnnnnnnnnnnnnnnnnnnnnnnnnnnnnnnnnnnnnnnnnnnnnnnnnnnnnnnnnnnnnnnnnnnnnnnnnnnnnnnnnnnnnnnnnnnnnnnnnnnnnnnnnnnnnnnnnnnnnnnnnnnnnnnnnnnnnnnnnnnnnnnnnnnnnnnnnnnnnnnnnnnnnnnnnnnnnnnnnnnnnnnnnnnnnnnnnnnnnnnnnnnnnnnnnnnnnnnnnnnnnnnnnnnnnnnnnnnnnnnnnnnnnnnnnnnnnnnnnnnnnnnnnnnnnnnnnnnnnnnnnnnnnnnnnnnnnnnnnnnnnnnnnnnnnnnnnnnnnnnnnnnnnnnnnnnnnnnnnnnnnnnnnnnnnnnnnnnnnnnnnnnnnnnnnnnnnnnnnnnnnnnnnnnnnnnnnnnnnnnnnnnnnnnnnnnnnnnnnnnnnnnnnnnnnnnnnnnnnnnnnnnnnnnnnnnnnnnnnnnnnnnnnnnnnnnnnnnnnnnnnnnnnnnnnnnnnnnnnnnnnnnnnnnnnnnnnnnnnnnnnnnnnnnnnnnnnnnnnnnnnnnnnnnnnnnnnnnnnnnnnnnnnnnnnnnnnnnnnnnnnnnnnnnnnnnnnnnnnnnnnnnnnnnnnnnnnnnnnnnnnnnnnnnnnnnnnnnnnnnnnnnnnnnnnnnnnnnnnnnnnnnnnnnnnnnnnnnnnnnnnnnnnnnnnnnnnnnnnnnnnnnnnnnnnnnnnnnnnnnnnnnnnnnnnnnnnnnnnnnnnnnnnnnnnnnnnnnnnnnnnnnnnnnnnnnnnnnnnnnnnnnnnnnnnnnnnnnnnnnnnnnnnnnnnnnnnnnnnnnnnnnnnnnnnnnnnnnnnnnnnnnnnnnnnnnnnnnnnnnnnnnnnnnnnnnnnnnnnnnnnnnnnnnnnnnnnnnnnnnnnnnnnnnnnnnnnnnnnnnnnnnnnnnnnnnnnnnnnnnnnnnnnnnnnnnnnnnnnnnnnnnnnnnnnnnnnnnnnnnnnnnnnnnnnnnnnnnnnnnnnnnnnnnnnnnnnnnnnnnnnnnnnnnnnnnnnnnnnnnnnnnnnnnnnnnnnnnnnnnnnnnnnnnnnnnnnnnnnnnnnnnnnnnnnnnnnnnnnnnnnnnnnnnnnnnnnnnnnnnnnnnnnnnnnnnnnnnnnnnnnnnnnnnnnnnnnnnnnnnnnnnnnnnnnnnnnnnnnnnnnnnnnnnnnnnnnnnnnnnnnnnnnnnnnnnnnnnnnnnnnnnnnnnnnnnnnnnnnnnnnnnnnnnnnnnnnnnnnnnnnnnnnnnnnnnnnnnnnnnnnnnnnnnnnnnnnnnnnnnnnnnnnnnnnnnnnnnnnnnnnnnnnnnnnnnnnnnnnnnnnnnnnnnnnnnnnnnnnnnnnnnnnnnnnnnnnnnnnnnnnnnnnnnnnnnnnnnnnnnnnnnnnnnnnnnnnnnnnnnnnnnnnnnnnnnnnnnnnnnnnnnnnnnnnnnnnnnnnnnnnnnnnnnnnnnnnnnnnnnnnnnnnnnnnnnnnnnnnnnnnnnnnnnnnnnnnnnnnnnnnnnnnnnnnnnnnnnnnnnnnnnnnnnnnnnnnnnnnnnnnnnnnnnnnnnnnnnnnnnnnnnnnnnnnnnnnnnnnnnnnnnnnnnnnnnnnnnnnnnnnnnnnnnnnnnnnnnnnnnnnnnnnnnnnnnnnnnnnnnnnnnnnnnnnnnnnnnnnnnnnnnnnnnnnnnnnnnnnnnnnnnnnnnnnnnnnnnnnnnnnnnnnnnnnnnnnnnnnnnnnnnnnnnnnnnnnnnnnnnnnnnnnnnnnnnnnnnnnnnnnnnnnnnnnnnnnnnnnnnnnnnnnnnnnnnnnnnnnnnnnnnnnnnnnnnnnnnnnnnnnnnnnnnnnnnnnnnnnnnnnnnnnnnnnnnnnnnnnnnnnnnnnnnnnnnnnnnnnnnnnnnnnnnnnnnnnnnnnnnnnnnnnnnnnnnnnnnnnnnnnnnnnnnnnnnnnnnnnnnnnnnnnnnnnnnnnnnnnnnnnnnnnnnnnnnnnnnnnnnnnnnnnnnnnnnnnnnnnnnnnnnnnnnnnnnnnnnnnnnnnnnnnnnnnnnnnnnnnnnnnnnnnnnnnnnnnnnnnnnnnnnnnnnnnnnnnnnnnnnnnnnnnnnnnnnnnnnnnnnnnnnnnnnnnnnnnnnnnnnnnnnnnnnnnnnnnnnnnnnnnnnnnnnnnnnnnnnnnnnnnnnnnnnnnnnnnnnnnnnnnnnnnnnnnnnnnnnnnnnnnnnnnnnnnnnnnnnnnnnnnnnnnnnnnnnnnnnnnnnnnnnnnnnnnnnnnnnnnnnnnnnnnnnnnnnnnnnnnnnnnnnnnnnnnnnnnnnnnnnnnnnnnnnnnnnnnnnnnnnnnnnnnnnnnnnnnnnnnnnnnnnnnnnnnnnnnnnnnnnnnnnnnnnnnnnnnnnnnnnnnnnnnnnnnnnnnnnnnnnnnnnnnnnnnnnnnnnnnnnnnnnnnnnnnnnnnnnnnnnnnnnnnnnnnnnnnnnnnnnnnnnnnnnnnnnnnnnnnnnnnnnnnnnnnnnnnnnnnnnnnnnnnnnnnnnnnnnnnnnnnnnnnnnnnnnnnnnnnnnnnnnnnnnnnnnnnnnnnnnnnnnnnnnnnnnnnnnnnnnnnnnnnnnnnnnnnnnnnnnnnnnnnnnnnnnnnnnnnnnnnnnnnnnnnnnnnnnnnnnnnnnnnnnnnnnnnnnnnnnnnnnnnnnnnnnnnnnnnnnnnnnnnnnnnnnnnnnnnnnnnnnnnnnnnnnnnnnnnnnnnnnnnnnnnnnnnnnnnnnnnnnnnnnnnnnnnnnnnnnnnnnnnnnnnnnnnnnnnnnnnnnnnnnnnnnnnnnnnnnnnnnnnnnnnnnnnnnnnnnnnnnnnnnnnnnnnnnnnnnnnnnnnnnnnnnnnnnnnnnnnnnnnnnnnnnnnnnnnnnnnnnnnnnnnnnnnnnnnnnnnnnnnnnnnnnnnnnnnnnnnnnnnnnnnnnnnnnnnnnnnnnnnnnnnnnnnnnnnnnnnnnnnnnnnnnnnnnnnnnnnnnnnnnnnnnnnnnnnnnnnnnnnnnnnnnnnnnnnnnnnnnnnnnnnnnnnnnnnnnnnnnnnnnnnnnnnnnnnnnnnnnnnnnnnnnnnnnnnnnnnnnnnnnnnnnnnnnnnnnnnnnnnnnnnnnnnnnnnnnnnnnnnnnnnnnnnnnnnnnnnnnnnnnnnnnnnnnnnnnnnnnnnnnnnnnnnnnnnnnnnnnnnnnnnnnnnnnnnnnnnnnnnnnnnnnnnnnnnnnnnnnnnnnnnnnnnnnnnnnnnnnnnnnnnnnnnnnnnnnnnnnnnnnnnnnnnnnnnnnnnnnnnnnnnnnnnnnnnnnnnnnnnnnnnnnnnnnnnnnnnnnnnnnnnnnnnnnnnnnnnnnnnnnnnnnnnnnnnnnnnnnnnnnnnnnnnnnnnnnnnnnnnnnnnnnnnnnnnnnnnnnnnnnnnnnnnnnnnnnnnnnnnnnnnnnnnnnnnnnnnnnnnnnnnnnnnnnnnnnnnnnnnnnnnnnnnnnnnnnnnnnnnnnnnnnnnnnnnnnnnnnnnnnnnnnnnnnnnnnnnnnnnnnnnnnnnnnnnnnnnnnnnnnnnnnnnnnnnnnnnnnnnnnnnnnnnnnnnnnnnnnnnnnnnnnnnnnnnnnnnnnnnnnnnnnnnnnnnnnnnnnnnnnnnnnnnnnnnnnnnnnnnnnnnnnnnnnnnnnnnnnnnnnnnnnnnnnnnnnnnnnnnnnnnnnnnnnnnnnnnnnnnnnnnnnnnnnnnnnnnnnnnnnnnnnnnnnnnnnnnnnnnnnnnnnnnnnnnnnnnnnnnnnnnnnnnnnnnnnnnnnnnnnnnnnnnnnnnnnnnnnnnnnnnnnnnnnnnnnnnnnnnnnnnnnnnnnnnnnnnnnnnnnnnnnnnnnnnnnnnnnnnnnnnnnnnnnnnnnnnnnnnnnnnnnnnnnnnnnnnnnnnnnnnnnnnnnnnnnnnnnnnnnnnnnnnnnnnnnnnnnnnnnnnnnnnnnnnnnnnnnnnnnnnnnnnnnnnnnnnnnnnnnnnnnnnnnnnnnnnnnnnnnnnnnnnnnnnnnnnnnnnnnnnnnnnnnnnnnnnnnnnnnnnnnnnnnnnnnnnnnnnnnnnnnnnnnnnnnnnnnnnnnnnnnnnnnnnnnnnnnnnnnnnnnnnnnnnnnnnnnnnnnnnnnnnnnnnnnnnnnnnnnnnnnnnnnnnnnnnnnnnnnnnnnnnnnnnnnnnnnnnnnnnnnnnnnnnnnnnnnnnnnnnnnnnnnnnnnnnnnnnnnnnnnnnnnnnnnnnnnnnnnnnnnnnnnnnnnnnnnnnnnnnnnnnnnnnnnnnnnnnnnnnnnnnnnnnnnnnnnnnnnnnnnnnnnnnnnnnnnnnnnnnnnnnnnnnnnnnnnnnnnnnnnnnnnnnnnnnnnnnnnnnnnnnnnnnnnnnnnnnnnnnnnnnnnnnnnnnnnnnnnnnnnnnnnnnnnnnnnnnnnnnnnnnnnnnnnnnnnnnnnnnnnnnnnnnnnnnnnnnnnnnnnnnnnnnnnnnnnnnnnnnnnnnnnnnnnnnnnnnnnnnnnnnnnnnnnnnnnnnnnnnnnnnnnnnnnnnnnnnnnnnnnnnnnnnnnnnnnnnnnnnnnnnnnnnnnnnnnnnnnnnnnnnnnnnnnnnnnnnnnnnnnnnnnnnnnnnnnnnnnnnnnnnnnnnnnnnnnnnnnnnnnnnnnnnnnnnnnnnnnnnnnnnnnnnnnnnnnnnnnnnnnnnnnnnnnnnnnnnnnnnnnnnnnnnnnnnnnnnnnnnnnnnnnnnnnnnnnnnnnnnnnnnnnnnnnnnnnnnnnnnnnnnnnnnnnnnnnnnnnnnnnnnnnnnnnnnnnnnnnnnnnnnnnnnnnnnnnnnnnnnnnnnnnnnnnnnnnnnnnnnnnnnnnnnnnnnnnnnnnnnnnnnnnnnnnnnnnnnnnnnnnnnnnnnnnnnnnnnnnnnnnnnnnnnnnnnnnnnnnnnnnnnnnnnnnnnnnnnnnnnnnnnnnnnnnnnnnnnnnnnnnnnnnnnnnnnnnnnnnnnnnnnnnnnnnnnnnnnnnnnnnnnnnnnnnnnnnnnnnnnnnnnnnnnnnnnnnnnnnnnnnnnnnnnnnnnnnnnnnnnnnnnnnnnnnnnnnnnnnnnnnnnnnnnnnnnnnnnnnnnnnnnnnnnnnnnnnnnnnnnnnnnnnnnnnnnnnnnnnnnnnnnnnnnnnnnnnnnnnnnnnnnnnnnnnnnnnnnnnnnnnnnnnnnnnnnnnnnnnnnnnnnnnnnnnnnnnnnnnnnnnnnnnnnnnnnnnnnnnnnnnnnnnnnnnnnnnnnnnnnnnnnnnnnnnnnnnnnnnnnnnnnnnnnnnnnnnnnnnnnnnnnnnnnnnnnnnnnnnnnnnnnnnnnnnnnnnnnnnnnnnnnnnnnnnnnnnnnnnnnnnnnnnnnnnnnnnnnnnnnnnnnnnnnnnnnnnnnnnnnnnnnnnnnnnnnnnnnnnnnnnnnnnnnnnnnnnnnnnnnnnnnnnnnnnnnnnnnnnnnnnnnnnnnnnnnnnnnnnnnnnnnnnnnnnnnnnnnnnnnnnnnnnnnnnnnnnnnnnnnnnnnnnnnnnnnnnnnnnnnnnnnnnnnnnnnnnnnnnnnnnnnnnnnnnnnnnnnnnnnnnnnnnnnnnnnnnnnnnnnnnnnnnnnnnnnnnnnnnnnnnnnnnnnnnnnnnnnnnnnnnnnnnnnnnnnnnnnnnnnnnnnnnnnnnnnnnnnnnnnnnnnnnnnnnnnnnnnnnnnnnnnnnnnnnnnnnnnnnnnnnnnnnnnnnnnnnnnnnnnnnnnnnnnnnnnnnnnnnnnnnnnnnnnnnnnnnnnnnnnnnnnnnnnnnnnnnnnnnnnnnnnnnnnnnnnnnnnnnnnnnnnnnnnnnnnnnnnnnnnnnnnnnnnnnnnnnnnnnnnnnnnnnnnnnnnnnnnnnnnnnnnnnnnnnnnnnnnnnnnnnnnnnnnnnnnnnnnnnnnnnnnnnnnnnnnnnnnnnnnnnnnnnnnnnnnnnnnnnnnnnnnnnnnnnnnnnnnnnnnnnnnnnnnnnnnnnnnnnnnnnnnnnnnnnnnnnnnnnnnnnnnnnnnnnnnnnnnnnnnnnnnnnnnnnnnnnnnnnnnnnnnnnnnnnnnnnnnnnnnnnnnnnnnnnnnnnnnnnnnnnnnnnnnnnnnnnnnnnnnnnnnnnnnnnnnnnnnnnnnnnnnnnnnnnnnnnnnnnnnnnnnnnnnnnnnnnnnnnnnnnnnnnnnnnnnnnnnnnnnnnnnnnnnnnnnnnnnnnnnnnnnnnnnnnnnnnnnnnnnnnnnnnnnnnnnnnnnnnnnnnnnnnnnnnnnnnnnnnnnnnnnnnnnnnnnnnnnnnnnnnnnnnnnnnnnnnnnnnnnnnnnnnnnnnnnnnnnnnnnnnnnnnnnnnnnnnnnnnnnnnnnnnnnnnnnnnnnnnnnnnnnnnnnnnnnnnnnnnnnnnnnnnnnnnnnnnnnnnnnnnnnnnnnnnnnnnnnnnnnnnnnnnnnnnnnnnnnnnnnnnnnnnnnnnnnnnnnnnnnnnnnnnnnnnnnnnnnnnnnnnnnnnnnnnnnnnnnnnnnnnnnnnnnnnnnnnnnnnnnnnnnnnnnnnnnnnnnnnnnnnnnnnnnnnnnnnnnnnnnnnnnnnnnnnnnnnnnnnnnnnnnnnnnnnnnnnnnnnnnnnnnnnnnnnnnnnnnnnnnnnnnnnnnnnnnnnnnnnnnnnnnnnnnnnnnnnnnnnnnnnnnnnnnnnnnnnnnnnnnnnnnnnnnnnnnnnnnnnnnnnnnnnnnnnnnnnnnnnnnnnnnnnnnnnnnnnnnnnnnnnnnnnnnnnnnnnnnnnnnnnnnnnnnnnnnnnnnnnnnnnnnnnnnnnnnnnnnnnnnnnnnnnnnnnnnnnnnnnnnnnnnnnnnnnnnnnnnnnnnnnnnnnnnnnnnnnnnnnnnnnnnnnnnnnnnnnnnnnnnnnnnnnnnnnnnnnnnnnnnnnnnnnnnnnnnnnnnnnnnnnnnnnnnnnnnnnnnnnnnnnnnnnnnnnnnnnnnnnnnnnnnnnnnnnnnnnnnnnnnnnnnnnnnnnnnnnnnnnnnnnnnnnnnnnnnnnnnnnnnnnnnnnnnnnnnnnnnnnnnnnnnnnnnnnnnnnnnnnnnnnnnnnnnnnnnnnnnnnnnnnnnnnnnnnnnnnnnnnnnnnnnnnnnnnnnnnnnnnnnnnnnnnnnnnnnnnnnnnnnnnnnnnnnnnnnnnnnnnnnnnnnnnnnnnnnnnnnnnnnnnnnnnnnnnnnnnnnnnnnnnnnnnnnnnnnnnnnnnnnnnnnnnnnnnnnnnnnnnnnnnnnnnnnnnnnnnnnnnnnnnnnnnnnnnnnnnnnnnnnnnnnnnnnnnnnnnnnnnnnnnnnnnnnnnnnnnnnnnnnnnnnnnnnnnnnnnnnnnnnnnnnnnnnnnnnnnnnnnnnnnnnnnnnnnnnnnnnnnnnnnnnnnnnnnnnnnnnnnnnnnnnnnnnnnnnnnnnnnnnnnnnnnnnnnnnnnnnnnnnnnnnnnnnnnnnnnnnnnnnnnnnnnnnnnnnnnnnnnnnnnnnnnnnnnnnnnnnnnnnnnnnnnnnnnnnnnnnnnnnnnnnnnnnnnnnnnnnnnnnnnnnnnnnnnnnnnnnnnnnnnnnnnnnnnnnnnnnnnnnnnnnnnnnnnnnnnnnnnnnnnnnnnnnnnnnnnnnnnnnnnnnnnnnnnnnnnnnnnnnnnnnnnnnnnnnnnnnnnnnnnnnnnnnnnnnnnnnnnnnnnnnnnnnnnnnnnnnnnnnnnnnnnnnnnnnnnnnnnnnnnnnnnnnnnnnnnnnnnnnnnnnnnnnnnnnnnnnnnnnnnnnnnnnnnnnnnnnnnnnnnnnnnnnnnnnnnnnnnnnnnnnnnnnnnnnnnnnnnnnnnnnnnnnnnnnnnnnnnnnnnnnnnnnnnnnnnnnnnnnnnnnnnnnnnnnnnnnnnnnnnnnnnnnnnnnnnnnnnnnnnnnnnnnnnnnnnnnnnnnnnnnnnnnnnnnnnnnnnnnnnnnnnnnnnnnnnnnnnnnnnnnnnnnnnnnnnnnnnnnnnnnnnnnnnnnnnnnnnnnnnnnnnnnnnnnnnnnnnnnnnnnnnnnnnnnnnnnnnnnnnnnnnnnnnnnnnnnnnnnnnnnnnnnnnnnnnnnnnnnnnnnnnnnnnnnnnnnnnnnnnnnnnnnnnnnnnnnnnnnnnnnnnnnnnnnnnnnnnnnnnnnnnnnnnnnnnnnnnnnnnnnnnnnnnnnnnnnnnnnnnnnnnnnnnnnnnnnnnnnnnnnnnnnnnnnnnnnnnnnnnnnnnnnnnnnnnnnnnnnnnnnnnnnnnnnnnnnnnnnnnnnnnnnnnnnnnnnnnnnnnnnnnnnnnnnnnnnnnnnnnnnnnnnnnnnnnnnnnnnnnnnnnnnnnnnnnnnnnnnnnnnnnnnnnnnnnnnnnnnnnnnnnnnnnnnnnnnnnnnnnnnnnnnnnnnnnnnnnnnnnnnnnnnnnnnnnnnnnnnnnnnnnnnnnnnnnnnnnnnnnnnnnnnnnnnnnnnnnnnnnnnnnnnnnnnnnnnnnnnnnnnnnnnnnnnnnnnnnnnnnnnnnnnnnnnnnnnnnnnnnnnnnnnnnnnnnnnnnnnnnnnnnnnnnnnnnnnnnnnnnnnnnnnnnnnnnnnnnnnnnnnnnnnnnnnnnnnnnnnnnnnnnnnnnnnnnnnnnnnnnnnnnnnnnnnnnnnnnnnnnnnnnnnnnnnnnnnnnnnnnnnnnnnnnnnnnnnnnnnnnnnnnnnnnnnnnnnnnnnnnnnnnnnnnnnnnnnnnnnnnnnnnnnnnnnnnnnnnnnnnnnnnnnnnnnnnnnnnnnnnnnnnnnnnnnnnnnnnnnnnnnnnnnnnnnnnnnnnnnnnnnnnnnnnnnnnnnnnnnnnnnnnnnnnnnnnnnnnnnnnnnnnnnnnnnnnnnnnnnnnnnnnnnnnnnnnnnnnnnnnnnnnnnnnnnnnnnnnnnnnnnnnnnnnnnnnnnnnnnnnnnnnnnnnnnnnnnnnnnnnnnnnnnnnnnnnnnnnnnnnnnnnnnnnnnnnnnnnnnnnnnnnnnnnnnnnnnnnnnnnnnnnnnnnnnnnnnnnnnnnnnnnnnnnnnnnnnnnnnnnnnnnnnnnnnnnnnnnnnnnnnnnnnnnnnnnnnnnnnnnnnnnnnnnnnnnnnnnnnnnnnnnnnnnnnnnnnnnnnnnnnnnnnnnnnnnnnnnnnnnnnnnnnnnnnnnnnnnnnnnnnnnnnnnnnnnnnnnnnnnnnnnnnnnnnnnnnnnnnnnnnnnnnnnnnnnnnnnnnnnnnnnnnnnnnnnnnnnnnnnnnnnnnnnnnnnnnnnnnnnnnnnnnnnnnnnnnnnnnnnnnnnnnnnnnnnnnnnnnnnnnnnnnnnnnnnnnnnnnnnnnnnnnnnnnnnnnnnnnnnnnnnnnnnnnnnnnnnnnnnnnnnnnnnnnnnnnnnnnnnnnnnnnnnnnnnnnnnnnnnnnnnnnnnnnnnnnnnnnnnnnnnnnnnnnnnnnnnnnnnnnnnnnnnnnnnnnnnnnnnnnnnnnnnnnnnnnnnnnnnnnnnnnnnnnnnnnnnnnnnnnnnnnnnnnnnnnnnnnnnnnnnnnnnnnnnnnnnnnnnnnnnnnnnnnnnnnnnnnnnnnnnnnnnnnnnnnnnnnnnnnnnnnnnnnnnnnnnnnnnnnnnnnnnnnnnnnnnnnnnnnnnnnnnnnnnnnnnnnnnnnnnnnnnnnnnnnnnnnnnnnnnnnnnnnnnnnnnnnnnnnnnnnnnnnnnnnnnnnnnnnnnnnnnnnnnnnnnnnnnnnnnnnnnnnnnnnnnnnnnnnnnnnnnnnnnnnnnnnnnnnnnnnnnnnnnnnnnnnnnnnnnnnnnnnnnnnnnnnnnnnnnnnnnnnnnnnnnnnnnnnnnnnnnnnnnnnnnnnnnnnnnnnnnnnnnnnnnnnnnnnnnnnnnnnnnnnnnnnnnnnnnnnnnnnnnnnnnnnnnnnnnnnnnnnnnnnnnnnnnnnnnnnnnnnnnnnnnnnnnnnnnnnnnnnnnnnnnnnnnnnnnnnnnnnnnnnnnnnnnnnnnnnnnnnnnnnnnnnnnnnnnnnnnnnnnnnnnnnnnnnnnnnnnnnnnnnnnnnnnnnnnnnnnnnnnnnnnnnnnnnnnnnnnnnnnnnnnnnnnnnnnnnnnnnnnnnnnnnnnnnnnnnnnnnnnnnnnnnnnnnnnnnnnnnnnnnnnnnnnnnnnnnnnnnnnnnnnnnnnnnnnnnnnnnnnnnnnnnnnnnnnnnnnnnnnnnnnnnnnnnnnnnnnnnnnnnnnnnnnnnnnnnnnnnnnnnnnnnnnnnnnnnnnnnnnnnnnnnnnnnnnnnnnnnnnnnnnnnnnnnnnnnnnnnnnnnnnnnnnnnnnnnnnnnnnnnnnnnnnnnnnnnnnnnnnnnnnnnnnnnnnnnnnnnnnnnnnnnnnnnnnnnnnnnnnnnnnnnnnnnnnnnnnnnnnnnnnnnnnnnnnnnnnnnnnnnnnnnnnnnnnnnnnnnnnnnnnnnnnnnnnnnnnnnnnnnnnnnnnnnnnnnnnnnnnnnnnnnnnnnnnnnnnnnnnnnnnnnnnnnnnnnnnnnnnnnnnnnnnnnnnnnnnnnnnnnnnnnnnnnnnnnnnnnnnnnnnnnnnnnnnnnnnnnnnnnnnnnnnnnnnnnnnnnnnnnnnnnnnnnnnnnnnnnnnnnnnnnnnnnnnnnnnnnnnnnnnnnnnnnnnnnnnnnnnnnnnnnnnnnnnnnnnnnnnnnnnnnnnnnnnnnnnnnnnnnnnnnnnnnnnnnnnnnnnnnnnnnnnnnnnnnnnnnnnnnnnnnnnnnnnnnnnnnnnnnnnnnnnnnnnnnnnnnnnnnnnnnnnnnnnnnnnnnnnnnnnnnnnnnnnnnnnnnnnnnnnnnnnnnnnnnnnnnnnnnnnnnnnnnnnnnnnnnnnnnnnnnnnnnnnnnnnnnnnnnnnnnnnnnnnnnnnnnnnnnnnnnnnnnnnnnnnnnnnnnnnnnnnnnnnnnnnnnnnnnnnnnnnnnnnnnnnnnnnnnnnnnnnnnnnnnnnnnnnnnnnnnnnnnnnnnnnnnnnnnnnnnnnnnnnnnnnnnnnnnnnnnnnnnnnnnnnnnnnnnnnnnnnnnnnnnnnnnnnnnnnnnnnnnnnnnnnnnnnnnnnnnnnnnnnnnnnnnnnnnnnnnnnnnnnnnnnnnnnnnnnnnnnnnnnnnnnnnnnnnnnnnnnnnnnnnnnnnnnnnnnnnnnnnnnnnnnnnnnnnnnnnnnnnnnnnnnnnnnnnnnnnnnnnnnnnnnnnnnnnnnnnnnnnnnnnnnnnnnnnnnnnnnnnnnnnnnnnnnnnnnnnnnnnnnnnnnnnnnnnnnnnnnnnnnnnnnnnnnnnnnnnnnnnnnnnnnnnnnnnnnnnnnnnnnnnnnnnnnnnnnnnnnnnnnnnnnnnnnnnnnnnnnnnnnnnnnnnnnnnnnnnnnnnnnnnnnnnnnnnnnnnnnnnnnnnnnnnnnnnnnnnnnnnnnnnnnnnnnnnnnnnnnnnnnnnnnnnnnnnnnnnnnnnnnnnnnnnnnnnnnnnnnnnnnnnnnnnnnnnnnnnnnnnnnnnnnnnnnnnnnnnnnnnnnnnnnnnnnnnnnnnnnnnnnnnnnnnnnnnnnnnnnnnnnnnnnnnnnnnnnnnnnnnnnnnnnnnnnnnnnnnnnnnnnnnnnnnnnnnnnnnnnnnnnnnnnnnnnnnnnnnnnnnnnnnnnnnnnnnnnnnnnnnnnnnnnnnnnnnnnnnnnnnnnnnnnnnnnnnnnnnnnnnnnnnnnnnnnnnnnnnnnnnnnnnnnnnnnnnnnnnnnnnnnnnnnnnnnnnnnnnnnnnnnnnnnnnnnnnnnnnnnnnnnnnnnnnnnnnnnnnnnnnnnnnnnnnnnnnnnnnnnnnnnnnnnnnnnnnnnnnnnnnnnnnnnnnnnnnnnnnnnnnnnnnnnnnnnnnnnnnnnnnnnnnnnnnnnnnnnnnnnnnnnnnnnnnnnnnnnnnnnnnnnnnnnnnnnnnnnnnnnnnnnnnnnnnnnnnnnnnnnnnnnnnnnnnnnnnnnnnnnnnnnnnnnnnnnnnnnnnnnnnnnnnnnnnnnnnnnnnnnnnnnnnnnnnnnnnnnnnnnnnnnnnnnnnnnnnnnnnnnnnnnnnnnnnnnnnnnnnnnnnnnnnnnnnnnnnnnnnnnnnnnnnnnnnnnnnnnnnnnnnnnnnnnnnnnnnnnnnnnnnnnnnnnnnnnnnnnnnnnnnnnnnnnnnnnnnnnnnnnnnnnnnnnnnnnnnnnnnnnnnnnnnnnnnnnnnnnnnnnnnnnnnnnnnnnnnnnnnnnnnnnnnnnnnnnnnnnnnnnnnnnnnnnnnnnnnnnnnnnnnnnnnnnnnnnnnnnnnnnnnnnnnnnnnnnnnnnnnnnnnnnnnnnnnnnnnnnnnnnnnnnnnnnnnnnnnnnnnnnnnnnnnnnnnnnnnnnnnnnnnnnnnnnnnnnnnnnnnnnnnnnnnnnnnnnnnnnnnnnnnnnnnnnnnnnnnnnnnnnnnnnnnnnnnnnnnnnnnnnnnnnnnnnnnnnnnnnnnnnnnnnnnnnnnnnnnnnnnnnnnnnnnnnnnnnnnnnnnnnnnnnnnnnnnnnnnnnnnnnnnnnnnnnnnnnnnnnnnnnnnnnnnnnnnnnnnnnnnnnnnnnnnnnnnnnnnnnnnnnnnnnnnnnnnnnnnnnnnnnnnnnnnnnnnnnnnnnnnnnnnnnnnnnnnnnnnnnnnnnnnnnnnnnnnnnnnnnnnnnnnnnnnnnnnnnnnnnnnnnnnnnnnnnnnnnnnnnnnnnnnnnnnnnnnnnnnnnnnnnnnnnnnnnnnnnnnnnnnnnnnnnnnnnnnnnnnnnnnnnnnnnnnnnnnnnnnnnnnnnnnnnnnnnnnnnnnnnnnnnnnnnnnnnnnnnnnnnnnnnnnnnnnnnnnnnnnnnnnnnnnnnnnnnnnnnnnnnnnnnnnnnnnnnnnnnnnnnnnnnnnnnnnnnnnnnnnnnnnnnnnnnnnnnnnnnnnnnnnnnnnnnnnnnnnnnnnnnnnnnnnnnnnnnnnnnnnnnnnnnnnnnnnnnnnnnnnnnnnnnnnnnnnnnnnnnnnnnnnnnnnnnnnnnnnnnnnnnnnnnnnnnnnnnnnnnnnnnnnnnnnnnnnnnnnnnnnnnnnnnnnnnnnnnnnnnnnnnnnnnnnnnnnnnnnnnnnnnnnnnnnnnnnnnnnnnnnnnnnnnnnnnnnnnnnnnnnnnnnnnnnnnnnnnnnnnnnnnnnnnnnnnnnnnnnnnnnnnnnnnnnnnnnnnnnnnnnnnnnnnnnnnnnnnnnnnnnnnnnnnnnnnnnnnnnnnnnnnnnnnnnnnnnnnnnnnnnnnnnnnnnnnnnnnnnnnnnnnnnnnnnnnnnnnnnnnnnnnnnnnnnnnnnnnnnnnnnnnnnnnnnnnnnnnnnnnnnnnnnnnnnnnnnnnnnnnnnnnnnnnnnnnnnnnnnnnnnnnnnnnnnnnnnnnnnnnnnnnnnnnnnnnnnnnnnnnnnnnnnnnnnnnnnnnnnnnnnnnnnnnnnnnnnnnnnnnnnnnnnnnnnnnnnnnnnnnnnnnnnnnnnnnnnnnnnnnnnnnnnnnnnnnnnnnnnnnnnnnnnnnnnnnnnnnnnnnnnnnnnnnnnnnnnnnnnnnnnnnnnnnnnnnnnnnnnnnnnnnnnnnnnnnnnnnnnnnnnnnnnnnnnnnnnnnnnnnnnnnnnnnnnnnnnnnnnnnnnnnnnnnnnnnnnnnnnnnnnnnnnnnnnnnnnnnnnnnnnnnnnnnnnnnnnnnnnnnnnnnnnnnnnnnnnnnnnnnnnnnnnnnnnnnnnnnnnnnnnnnnnnnnnnnnnnnnnnnnnnnnnnnnnnnnnnnnnnnnnnnnnnnnnnnnnnnnnnnnnnnnnnnnnnnnnnnnnnnnnnnnnnnnnnnnnnnnnnnnnnnnnnnnnnnnnnnnnnnnnnnnnnnnnnnnnnnnnnnnnnnnnnnnnnnnnnnnnnnnnnnnnnnnnnnnnnnnnnnnnnnnnnnnnnnnnnnnnnnnnnnnnnnnnnnnnnnnnnnnnnnnnnnnnnnnnnnnnnnnnnnnnnnnnnnnnnnnnnnnnnnnnnnnnnnnnnnnnnnnnnnnnnnnnnnnnnnnnnnnnnnnnnnnnnnnnnnnnnnnnnnnnnnnnnnnnnnnnnnnnnnnnnnnnnnnnnnnnnnnnnnnnnnnnnnnnnnnnnnnnnnnnnnnnnnnnnnnnnnnnnnnnnnnnnnnnnnnnnnnnnnnnnnnnnnnnnnnnnnnnnnnnnnnnnnnnnnnnnnnnnnnnnnnnnnnnnnnnnnnnnnnnnnnnnnnnnnnnnnnnnnnnnnnnnnnnnnnnnnnnnnnnnnnnnnnnnnnnnnnnnnnnnnnnnnnnnnnnnnnnnnnnnnnnnnnnnnnnnnnnnnnnnnnnnnnnnnnnnnnnnnnnnnnnnnnnnnnnnnnnnnnnnnnnnnnnnnnnnnnnnnnnnnnnnnnnnnnnnnnnnnnnnnnnnnnnnnnnnnnnnnnnnnnnnnnnnnnnnnnnnnnnnnnnnnnnnnnnnnnnnnnnnnnnnnnnnnnnnnnnnnnnnnnnnnnnnnnnnnnnnnnnnnnnnnnnnnnnnnnnnnnnnnnnnnnnnnnnnnnnnnnnnnnnnnnnnnnnnnnnnnnnnnnnnnnnnnnnnnnnnnnnnnnnnnnnnnnnnnnnnnnnnnnnnnnnnnnnnnnnnnnnnnnnnnnnnnnnnnnnnnnnnnnnnnnnnnnnnnnnnnnnnnnnnnnnnnnnnnnnnnnnnnnnnnnnnnnnnnnnnnnnnnnnnnnnnnnnnnnnnnnnnnnnnnnnnnnnnnnnnnnnnnnnnnnnnnnnnnnnnnnnnnnnnnnnnnnnnnnnnnnnnnnnnnnnnnnnnnnnnnnnnnnnnnnnnnnnnnnnnnnnnnnnnnnnnnnnnnnnnnnnnnnnnnnnnnnnnnnnnnnnnnnnnnnnnnnnnnnnnnnnnnnnnnnnnnnnnnnnnnnnnnnnnnnnnnnnnnnnnnnnnnnnnnnnnnnnnnnnnnnnnnnnnnnnnnnnnnnnnnnnnnnnnnnnnnnnnnnnnnnnnnnnnnnnnnnnnnnnnnnnnnnnnnnnnnnnnnnnnnnnnnnnnnnnnnnnnnnnnnnnnnnnnnnnnnnnnnnnnnnnnnnnnnnnnnnnnnnnnnnnnnnnnnnnnnnnnnnnnnnnnnnnnnnnnnnnnnnnnnnnnnnnnnnnnnnnnnnnnnnnnnnnnnnnnnnnnnnnnnnnnnnnnnnnnnnnnnnnnnnnnnnnnnnnnnnnnnnnnnnnnnnnnnnnnnnnnnnnnnnnnnnnnnnnnnnnnnnnnnnnnnnnnnnnnnnnnnnnnnnnnnnnnnnnnnnnnnnnnnnnnnnnnnnnnnnnnnnnnnnnnnnnnnnnnnnnnnnnnnnnnnnnnnnnnnnnnnnnnnnnnnnnnnnnnnnnnnnnnnnnnnnnnnnnnnnnnnnnnnnnnnnnnnnnnnnnnnnnnnnnnnnnnnnnnnnnnnnnnnnnnnnnnnnnnnnnnnnnnnnnnnnnnnnnnnnnnnnnnnnnnnnnnnnnnnnnnnnnnnnnnnnnnnnnnnnnnnnnnnnnnnnnnnnnnnnnnnnnnnnnnnnnnnnnnnnnnnnnnnnnnnnnnnnnnnnnnnnnnnnnnnnnnnnnnnnnnnnnnnnnnnnnnnnnnnnnnnnnnnnnnnnnnnnnnnnnnnnnnnnnnnnnnnnnnnnnnnnnnnnnnnnnnnnnnnnnnnnnnnnnnnnnnnnnnnnnnnnnnnnnnnnnnnnnnnnnnnnnnnnnnnnnnnnnnnnnnnnnnnnnnnnnnnnnnnnnnnnnnnnnnnnnnnnnnnnnnnnnnnnnnnnnnnnnnnnnnnnnnnnnnnnnnnnnnnnnnnnnnnnnnnnnnnnnnnnnnnnnnnnnnnnnnnnnnnnnnnnnnnnnnnnnnnnnnnnnnnnnnnnnnnnnnnnnnnnnnnnnnnnnnnnnnnnnnnnnnnnnnnnnnnnnnnnnnnnnnnnnnnnnnnnnnnnnnnnnnnnnnnnnnnnnnnnnnnnnnnnnnnnnnnnnnnnnnnnnnnnnnnnnnnnnnnnnnnnnnnnnnnnnnnnnnnnnnnnnnnnnnnnnnnnnnnnnnnnnnnnnnnnnnnnnnnnnnnnnnnnnnnnnnnnnnnnnnnnnnnnnnnnnnnnnnnnnnnnnnnnnnnnnnnnnnnnnnnnnnnnnnnnnnnnnnnnnnnnnnnnnnnnnnnnnnnnnnnnnnnnnnnnnnnnnnnnnnnnnnnnnnnnnnnnnnnnnnnnnnnnnnnnnnnnnnnnnnnnnnnnnnnnnnnnnnnnnnnnnnnnnnnnnnnnnnnnnnnnnnnnnnnnnnnnnnnnnnnnnnnnnnnnnnnnnnnnnnnnnnnnnnnnnnnnnnnnnnnnnnnnnnnnnnnnnnnnnnnnnnnnnnnnnnnnnnnnnnnnnnnnnnnnnnnnnnnnnnnnnnnnnnnnnnnnnnnnnnnnnnnnnnnnnnnnnnnnnnnnnnnnnnnnnnnnnnnnnnnnnnnnnnnnnnnnnnnnnnnnnnnnnnnnnnnnnnnnnnnnnnnnnnnnnnnnnnnnnnnnnnnnnnnnnnnnnnnnnnnnnnnnnnnnnnnnnnnnnnnnnnnnnnnnnnnnnnnnnnnnnnnnnnnnnnnnnnnnnnnnnnnnnnnnnnnnnnnnnnnnnnnnnnnnnnnnnnnnnnnnnnnnnnnnnnnnnnnnnnnnnnnnnnnnnnnnnnnnnnnnnnnnnnnnnnnnnnnnnnnnnnnnnnnnnnnnnnnnnnnnnnnnnnnnnnnnnnnnnnnnnnnnnnnnnnnnnnnnnnnnnnnnnnnnnnnnnnnnnnnnnnnnnnnnnnnnnnnnnnnnnnnnnnnnnnnnnnnnnnnnnnnnnnnnnnnnnnnnnnnnnnnnnnnnnnnnnnnnnnnnnnnnnnnnnnnnnnnnnnnnnnnnnnnnnnnnnnnnnnnnnnnnnnnnnnnnnnnnnnnnnnnnnnnnnnnnnnnnnnnnnnnnnnnnnnnnnnnnnnnnnnnnnnnnnnnnnnnnnnnnnnnnnnnnnnnnnnnnnnnnnnnnnnnnnnnnnnnnnnnnnnnnnnnnnnnnnnnnnnnnnnnnnnnnnnnnnnnnnnnnnnnnnnnnnnnnnnnnnnnnnnnnnnnnnnnnnnnnnnnnnnnnnnnnnnnnnnnnnnnnnnnnnnnnnnnnnnnnnnnnnnnnnnnnnnnnnnnnnnnnnnnnnnnnnnnnnnnnnnnnnnnnnnnnnnnnnnnnnnnnnnnnnnnnnnnnnnnnnnnnnnnnnnnnnnnnnnnnnnnnnnnnnnnnnnnnnnnnnnnnnnnnnnnnnnnnnnnnnnnnnnnnnnnnnnnnnnnnnnnnnnnnnnnnnnnnnnnnnnnnnnnnnnnnnnnnnnnnnnnnnnnnnnnnnnnnnnnnnnnnnnnnnnnnnnnnnnnnnnnnnnnnnnnnnnnnnnnnnnnnnnnnnnnnnnnnnnnnnnnnnnnnnnnnnnnnnnnnnnnnnnnnnnnnnnnnnnnnnnnnnnnnnnnnnnnnnnnnnnnnnnnnnnnnnnnnnnnnnnnnnnnnnnnnnnnnnnnnnnnnnnnnnnnnnnnnnnnnnnnnnnnnnnnnnnnnnnnnnnnnnnnnnnnnnnnnnnnnnnnnnnnnnnnnnnnnnnnnnnnnnnnnnnnnnnnnnnnnnnnnnnnnnnnnnnnnnnnnnnnnnnnnnnnnnnnnnnnnnnnnnnnnnnnnnnnnnnnnnnnnnnnnnnnnnnnnnnnnnnnnnnnnnnnnnnnnnnnnnnnnnnnnnnnnnnnnnnnnnnnnnnnnnnnnnnnnnnnnnnnnnnnnnnnnnnnnnnnnnnnnnnnnnnnnnnnnnnnnnnnnnnnnnnnnnnnnnnnnnnnnnnnnnnnnnnnnnnnnnnnnnnnnnnnnnnnnnnnnnnnnnnnnnnnnnnnnnnnnnnnnnnnnnnnnnnnnnnnnnnnnnnnnnnnnnnnnnnnnnnnnnnnnnnnnnnnnnnnnnnnnnnnnnnnnnnnnnnnnnnnnnnnnnnnnnnnnnnnnnnnnnnnnnnnnnnnnnnnnnnnnnnnnnnnnnnnnnnnnnnnnnnnnnnnnnnnnnnnnnnnnnnnnnnnnnnnnnnnnnnnnnnnnnnnnnnnnnnnnnnnnnnnnnnnnnnnnnnnnnnnnnnnnnnnnnnnnnnnnnnnnnnnnnnnnnnnnnnnnnnnnnnnnnnnnnnnnnnnnnnnnnnnnnnnnnnnnnnnnnnnnnnnnnnnnnnnnnnnnnnnnnnnnnnnnnnnnnnnnnnnnnnnnnnnnnnnnnnnnnnnnnnnnnnnnnnnnnnnnnnnnnnnnnnnnnnnnnnnnnnnnnnnnnnnnnnnnnnnnnnnnnnnnnnnnnnnnnnnnnnnnnnnnnnnnnnnnnnnnnnnnnnnnnnnnnnnnnnnnnnnnnnnnnnnnnnnnnnnnnnnnnnnnnnnnnnnnnnnnnnnnnnnnnnnnnnnnnnnnnnnnnnnnnnnnnnnnnnnnnnnnnnnnnnnnnnnnnnnnnnnnnnnnnnnnnnnnnnnnnnnnnnnnnnnnnnnnnnnnnnnnnnnnnnnnnnnnnnnnnnnnnnnnnnnnnnnnnnnnnnnnnnnnnnnnnnnnnnnnnnnnnnnnnnnnnnnnnnnnnnnnnnnnnnnnnnnnnnnnnnnnnnnnnnnnnnnnnnnnnnnnnnnnnnnnnnnnnnnnnnnnnnnnnnnnnnnnnnnnnnnnnnnnnnnnnnnnnnnnnnnnnnnnnnnnnnnnnnnnnnnnnnnnnnnnnnnnnnnnnnnnnnnnnnnnnnnnnnnnnnnnnnnnnnnnnnnnnnnnnnnnnnnnnnnnnnnnnnnnnnnnnnnnnnnnnnnnnnnnnnnnnnnnnnnnnnnnnnnnnnnnnnnnnnnnnnnnnnnnnnnnnnnnnnnnnnnnnnnnnnnnnnnnnnnnnnnnnnnnnnnnnnnnnnnnnnnnnnnnnnnnnnnnnnnnnnnnnnnnnnnnnnnnnnnnnnnnnnnnnnnnnnnnnnnnnnnnnnnnnnnnnnnnnnnnnnnnnnnnnnnnnnnnnnnnnnnnnnnnnnnnnnnnnnnnnnnnnnnnnnnnnnnnnnnnnnnnnnnnnnnnnnnnnnnnnnnnnnnnnnnnnnnnnnnnnnnnnnnnnnnnnnnnnnnnnnnnnnnnnnnnnnnnnnnnnnnnnnnnnnnnnnnnnnnnnnnnnnnnnnnnnnnnnnnnnnnnnnnnnnnnnnnnnnnnnnnnnnnnnnnnnnnnnnnnnnnnnnnnnnnnnnnnnnnnnnnnnnnnnnnnnnnnnnnnnnnnnnnnnnnnnnnnnnnnnnnnnnnnnnnnnnnnnnnnnnnnnnnnnnnnnnnnnnnnnnnnnnnnnnnnnnnnnnnnnnnnnnnnnnnnnnnnnnnnnnnnnnnnnnnnnnnnnnnnnnnnnnnnnnnnnnnnnnnnnnnnnnnnnnnnnnnnnnnnnnnnnnnnnnnnnnnnnnnnnnnnnnnnnnnnnnnnnnnnnnnnnnnnnnnnnnnnnnnnnnnnnnnnnnnnnnnnnnnnnnnnnnnnnnnnnnnnnnnnnnnnnnnnnnnnnnnnnnnnnnnnnnnnnnnnnnnnnnnnnnnnnnnnnnnnnnnnnnnnnnnnnnnnnnnnnnnnnnnnnnnnnnnnnnnnnnnnnnnnnnnnnnnnnnnnnnnnnnnnnnnnnnnnnnnnnnnnnnnnnnnnnnnnnnnnnnnnnnnnnnnnnnnnnnnnnnnnnnnnnnnnnnnnnnnnnnnnnnnnnnnnnnnnnnnnnnnnnnnnnnnnnnnnnnnnnnnnnnnnnnnnnnnnnnnnnnnnnnnnnnnnnnnnnnnnnnnnnnnnnnnnnnnnnnnnnnnnnnnnnnnnnnnnnnnnnnnnnnnnnnnnnnnnnnnnnnnnnnnnnnnnnnnnnnnnnnnnnnnnnnnnnnnnnnnnnnnnnnnnnnnnnnnnnnnnnnnnnnnnnnnnnnnnnnnnnnnnnnnnnnnnnnnnnnnnnnnnnnnnnnnnnnnnnnnnnnnnnnnnnnnnnnnnnnnnnnnnnnnnnnnnnnnnnnnnnnnnnnnnnnnnnnnnnnnnnnnnnnnnnnnnnnnnnnnnnnnnnnnnnnnnnnnnnnnnnnnnnnnnnnnnnnnnnnnnnnnnnnnnnnnnnnnnnnnnnnnnnnnnnnnnnnnnnnnnnnnnnnnnnnnnnnnnnnnnnnnnnnnnnnnnnnnnnnnnnnnnnnnnnnnnnnnnnnnnnnnnnnnnnnnnnnnnnnnnnnnnnnnnnnnnnnnnnnnnnnnnnnnnnnnnnnnnnnnnnnnnnnnnnnnnnnnnnnnnnnnnnnnnnnnnnnnnnnnnnnnnnnnnnnnnnnnnnnnnnnnnnnnnnnnnnnnnnnnnnnnnnnnnnnnnnnnnnnnnnnnnnnnnnnnnnnnnnnnnnnnnnnnnnnnnnnnnnnnnnnnnnnnnnnnnnnnnnnnnnnnnnnnnnnnnnnnnnnnnnnnnnnnnnnnnnnnnnnnnnnnnnnnnnnnnnnnnnnnnnnnnnnnnnnnnnnnnnnnnnnnnnnnnnnnnnnnnnnnnnnnnnnnnnnnnnnnnnnnnnnnnnnnnnnnnnnnnnnnnnnnnnnnnnnnnnnnnnnnnnnnnnnnnnnnnnnnnnnnnnnnnnnnnnnnnnnnnnnnnnnnnnnnnnnnnnnnnnnnnnnnnnnnnnnnnnnnnnnnnnnnnnnnnnnnnnnnnnnnnnnnnnnnnnnnnnnnnnnnnnnnnnnnnnnnnnnnnnnnnnnnnnnnnnnnnnnnnnnnnnnnnnnnnnnnnnnnnnnnnnnnnnnnnnnnnnnnnnnnnnnnnnnnnnnnnnnnnnnnnnnnnnnnnnnnnnnnnnnnnnnnnnnnnnnnnnnnnnnnnnnnnnnnnnnnnnnnnnnnnnnnnnnnnnnnnnnnnnnnnnnnnnnnnnnnnnnnnnnnnnnnnnnnnnnnnnnnnnnnnnnnnnnnnnnnnnnnnnnnnnnnnnnnnnnnnnnnnnnnnnnnnnnnnnnnnnnnnnnnnnnnnnnnnnnnnnnnnnnnnnnnnnnnnnnnnnnnnnnnnnnnnnnnnnnnnnnnnnnnnnnnnnnnnnnnnnnnnnnnnnnnnnnnnnnnnnnnnnnnnnnnnnnnnnnnnnnnnnnnnnnnnnnnnnnnnnnnnnnnnnnnnnnnnnnnnnnnnnnnnnnnnnnnnnnnnnnnnnnnnnnnnnnnnnnnnnnnnnnnnnnnnnnnnnnnnnnnnnnnnnnnnnnnnnnnnnnnnnnnnnnnnnnnnnnnnnnnnnnnnnnnnnnnnnnnnnnnnnnnnnnnnnnnnnnnnnnnnnnnnnnnnnnnnnnnnnnnnnnnnnnnnnnnnnnnnnnnnnnnnnnnnnnnnnnnnnnnnnnnnnnnnnnnnnnnnnnnnnnnnnnnnnnnnnnnnnnnnnnnnnnnnnnnnnnnnnnnnnnnnnnnnnnnnnnnnnnnnnnnnnnnnnnnnnnnnnnnnnnnnnnnnnnnnnnnnnnnnnnnnnnnnnnnnnnnnnnnnnnnnnnnnnnnnnnnnnnnnnnnnnnnnnnnnnnnnnnnnnnnnnnnnnnnnnnnnnnnnnnnnnnnnnnnnnnnnnnnnnnnnnnnnnnnnnnnnnnnnnnnnnnnnnnnnnnnnnnnnnnnnnnnnnnnnnnnnnnnnnnnnnnnnnnnnnnnnnnnnnnnnnnnnnnnnnnnnnnnnnnnnnnnnnnnnnnnnnnnnnnnnnnnnnnnnnnnnnnnnnnnnnnnnnnnnnnnnnnnnnnnnnnnnnnnnnnnnnnnnnnnnnnnnnnnnnnnnnnnnnnnnnnnnnnnnnnnnnnnnnnnnnnnnnnnnnnnnnnnnnnnnnnnnnnnnnnnnnnnnnnnnnnnnnnnnnnnnnnnnnnnnnnnnnnnnnnnnnnnnnnnnnnnnnnnnnnnnnnnnnnnnnnnnnnnnnnnnnnnnnnnnnnnnnnnnnnnnnnnnnnnnnnnnnnnnnnnnnnnnnnnnnnnnnnnnnnnnnnnnnnnnnnnnnnnnnnnnnnnnnnnnnnnnnnnnnnnnnnnnnnnnnnnnnnnnnnnnnnnnnnnnnnnnnnnnnnnnnnnnnnnnnnnnnnnnnnnnnnnnnnnnnnnnnnnnnnnnnnnnnnnnnnnnnnnnnnnnnnnnnnnnnnnnnnnnnnnnnnnnnnnnnnnnnnnnnnnnnnnnnnnnnnnnnnnnnnnnnnnnnnnnnnnnnnnnnnnnnnnnnnnnnnnnnnnnnnnnnnnnnnnnnnnnnnnnnnnnnnnnnnnnnnnnnnnnnnnnnnnnnnnnnnnnnnnnnnnnnnnnnnnnnnnnnnnnnnnnnnnnnnnnnnnnnnnnnnnnnnnnnnnnnnnnnnnnnnnnnnnnnnnnnnnnnnnnnnnnnnnnnnnnnnnnnnnnnnnnnnnnnnnnnnnnnnnnnnnnnnnnnnnnnnnnnnnnnnnnnnnnnnnnnnnnnnnnnnnnnnnnnnnnnnnnnnnnnnnnnnnnnnnnnnnnnnnnnnnnnnnnnnnnnnnnnnnnnnnnnnnnnnnnnnnnnnnnnnnnnnnnnnnnnnnnnnnnnnnnnnnnnnnnnnnnnnnnnnnnnnnnnnnnnnnnnnnnnnnnnnnnnnnnnnnnnnnnnnnnnnnnnnnnnnnnnnnnnnnnnnnnnnnnnnnnnnnnnnnnnnnnnnnnnnnnnnnnnnnnnnnnnnnnnnnnnnnnnnnnnnnnnnnnnnnnnnnnnnnnnnnnnnnnnnnnnnnnnnnnnnnnnnnnnnnnnnnnnnnnnnnnnnnnnnnnnnnnnnnnnnnnnnnnnnnnnnnnnnnnnnnnnnnnnnnnnnnnnnnnnnnnnnnnnnnnnnnnnnnnnnnnnnnnnnnnnnnnnnnnnnnnnnnnnnnnnnnnnnnnnnnnnnnnnnnnnnnnnnnnnnnnnnnnnnnnnnnnnnnnnnnnnnnnnnnnnnnnnnnnnnnnnnnnnnnnnnnnnnnnnnnnnnnnnnnnnnnnnnnnnnnnnnnnnnnnnnnnnnnnnnnnnnnnnnnnnnnnnnnnnnnnnnnnnnnnnnnnnnnnnnnnnnnnnnnnnnnnnnnnnnnnnnnnnnnnnnnnnnnnnnnnnnnnnnnnnnnnnnnnnnnnnnnnnnnnnnnnnnnnnnnnnnnnnnnnnnnnnnnnnnnnnnnnnnnnnnnnnnnnnnnnnnnnnnnnnnnnnnnnnnnnnnnnnnnnnnnnnnnnnnnnnnnnnnnnnnnnnnnnnnnnnnnnnnnnnnnnnnnnnnnnnnnnnnnnnnnnnnnnnnnnnnnnnnnnnnnnnnnnnnnnnnnnnnnnnnnnnnnnnnnnnnnnnnnnnnnnnnnnnnnnnnnnnnnnnnnnnnnnnnnnnnnnnnnnnnnnnnnnnnnnnnnnnnnnnnnnnnnnnnnnnnnnnnnnnnnnnnnnnnnnnnnnnnnnnnnnnnnnnnnnnnnnnnnnnnnnnnnnnnnnnnnnnnnnnnnnnnnnnnnnnnnnnnnnnnnnnnnnnnnnnnnnnnnnnnnnnnnnnnnnnnnnnnnnnnnnnnnnnnnnnnnnnnnnnnnnnnnnnnnnnnnnnnnnnnnnnnnnnnnnnnnnnnnnnnnnnnnnnnnnnnnnnnnnnnnnnnnnnnnnnnnnnnnnnnnnnnnnnnnnnnnnnnnnnnnnnnnnnnnnnnnnnnnnnnnnnnnnnnnnnnnnnnnnnnnnnnnnnnnnnnnnnnnnnnnnnnnnnnnnnnnnnnnnnnnnnnnnnnnnnnnnnnnnnnnnnnnnnnnnnnnnnnnnnnnnnnnnnnnnnnnnnnnnnnnnnnnnnnnnnnnnnnnnnnnnnnnnnnnnnnnnnnnnnnnnnnnnnnnnnnnnnnnnnnnnnnnnnnnnnnnnnnnnnnnnnnnnnnnnnnnnnnnnnnnnnnnnnnnnnnnnnnnnnnnnnnnnnnnnnnnnnnnnnnnnnnnnnnnnnnnnnnnnnnnnnnnnnnnnnnnnnnnnnnnnnnnnnnnnnnnnnnnnnnnnnnnnnnnnnnnnnnnnnnnnnnnnnnnnnnnnnnnnnnnnnnnnnnnnnnnnnnnnnnnnnnnnnnnnnnnnnnnnnnnnnnnnnnnnnnnnnnnnnnnnnnnnnnnnnnnnnnnnnnnnnnnnnnnnnnnnnnnnnnnnnnnnnnnnnnnnnnnnnnnnnnnnnnnnnnnnnnnnnnnnnnnnnnnnnnnnnnnnnnnnnnnnnnnnnnnnnnnnnnnnnnnnnnnnnnnnnnnnnnnnnnnnnnnnnnnnnnnnnnnnnnnnnnnnnnnnnnnnnnnnnnnnnnnnnnnnnnnnnnnnnnnnnnnnnnnnnnnnnnnnnnnnnnnnnnnnnnnnnnnnnnnnnnnnnnnnnnnnnnnnnnnnnnnnnnnnnnnnnnnnnnnnnnnnnnnnnnnnnnnnnnnnnnnnnnnnnnnnnnnnnnnnnnnnnnnnnnnnnnnnnnnnnnnnnnnnnnnnnnnnnnnnnnnnnnnnnnnnnnnnnnnnnnnnnnnnnnnnnnnnnnnnnnnnnnnnnnnnnnnnnnnnnnnnnnnnnnnnnnnnnnnnnnnnnnnnnnnnnnnnnnnnnnnnnnnnnnnnnnnnnnnnnnnnnnnnnnnnnnnnnnnnnnnnnnnnnnnnnnnnnnnnnnnnnnnnnnnnnnnnnnnnnnnnnnnnnnnnnnnnnnnnnnnnnnnnnnnnnnnnnnnnnnnnnnnnnnnnnnnnnnnnnnnnnnnnnnnnnnnnnnnnnnnnnnnnnnnnnnnnnnnnnnnnnnnnnnnnnnnnnnnnnnnnnnnnnnnnnnnnnnnnnnnnnnnnnnnnnnnnnnnnnnnnnnnnnnnnnnnnnnnnnnnnnnnnnnnnnnnnnnnnnnnnnnnnnnnnnnnnnnnnnnnnnnnnnnnnnnnnnnnnnnnnnnnnnnnnnnnnnnnnnnnnnnnnnnnnnnnnnnnnnnnnnnnnnnnnnnnnnnnnnnnnnnnnnnnnnnnnnnnnnnnnnnnnnnnnnnnnnnnnnnnnnnnnnnnnnnnnnnnnnnnnnnnnnnnnnnnnnnnnnnnnnnnnnnnnnnnnnnnnnnnnnnnnnnnnnnnnnnnnnnnnnnnnnnnnnnnnnnnnnnnnnnnnnnnnnnnnnnnnnnnnnnnnnnnnnnnnnnnnnnnnnnnnnnnnnnnnnnnnnnnnnnnnnnnnnnnnnnnnnnnnnnnnnnnnnnnnnnnnnnnnnnnnnnnnnnnnnnnnnnnnnnnnnnnnnnnnnnnnnnnnnnnnnnnnnnnnnnnnnnnnnnnnnnnnnnnnnnnnnnnnnnnnnnnnnnnnnnnnnnnnnnnnnnnnnnnnnnnnnnnnnnnnnnnnnnnnnnnnnnnnnnnnnnnnnnnnnnnnnnnnnnnnnnnnnnnnnnnnnnnnnnnnnnnnnnnnnnnnnnnnnnnnnnnnnnnnnnnnnnnnnnnnnnnnnnnnnnnnnnnnnnnnnnnnnnnnnnnnnnnnnnnnnnnnnnnnnnnnnnnnnnnnnnnnnnnnnnnnnnnnnnnnnnnnnnnnnnnnnnnnnnnnnnnnnnnnnnnnnnnnnnnnnnnnnnnnnnnnnnnnnnnnnnnnnnnnnnnnnnnnnnnnnnnnnnnnnnnnnnnnnnnnnnnnnnnnnnnnnnnnnnnnnnnnnnnnnnnnnnnnnnnnnnnnnnnnnnnnnnnnnnnnnnnnnnnnnnnnnnnnnnnnnnnnnnnnnnnnnnnnnnnnnnnnnnnnnnnnnnnnnnnnnnnnnnnnnnnnnnnnnnnnnnnnnnnnnnnnnnnnnnnnnnnnnnnnnnnnnnnnnnnnnnnnnnnnnnnnnnnnnnnnnnnnnnnnnnnnnnnnnnnnnnnnnnnnnnnnnnnnnnnnnnnnnnnnnnnnnnnnnnnnnnnnnnnnnnnnnnnnnnnnnnnnnnnnnnnnnnnnnnnnnnnnnnnnnnnnnnnnnnnnnnnnnnnnnnnnnnnnnnnnnnnnnnnnnnnnnnnnnnnnnnnnnnnnnnnnnnnnnnnnnnnnnnnnnnnnnnnnnnnnnnnnnnnnnnnnnnnnnnnnnnnnnnnnnnnnnnnnnnnnnnnnnnnnnnnnnnnnnnnnnnnnnnnnnnnnnnnnnnnnnnnnnnnnnnnnnnnnnnnnnnnnnnnnnnnnnnnnnnnnnnnnnnnnnnnnnnnnnnnnnnnnnnnnnnnnnnnnnnnnnnnnnnnnnnnnnnnnnnnnnnnnnnnnnnnnnnnnnnnnnnnnnnnnnnnnnnnnnnnnnnnnnnnnnnnnnnnnnnnnnnnnnnnnnnnnnnnnnnnnnnnnnnnnnnnnnnnnnnnnnnnnnnnnnnnnnnnnnnnnnnnnnnnnnnnnnnnnnnnnnnnnnnnnnnnnnnnnnnnnnnnnnnnnnnnnnnnnnnnnnnnnnnnnnnnnnnnnnnnnnnnnnnnnnnnnnnnnnnnnnnnnnnnnnnnnnnnnnnnnnnnnnnnnnnnnnnnnnnnnnnnnnnnnnnnnnnnnnnnnnnnnnnnnnnnnnnnnnnnnnnnnnnnnnnnnnnnnnnnnnnnnnnnnnnnnnnnnnnnnnnnnnnnnnnnnnnnnnnnnnnnnnnnnnnnnnnnnnnnnnnnnnnnnnnnnnnnnnnnnnnnnnnnnnnnnnnnnnnnnnnnnnnnnnnnnnnnnnnnnnnnnnnnnnnnnnnnnnnnnnnnnnnnnnnnnnnnnnnnnnnnnnnnnnnnnnnnnnnnnnnnnnnnnnnnnnnnnnnnnnnnnnnnnnnnnnnnnnnnnnnnnnnnnnnnnnnnnnnnnnnnnnnnnnnnnnnnnnnnnnnnnnnnnnnnnnnnnnnnnnnnnnnnnnnnnnnnnnnnnnnnnnnnnnnnnnnnnnnnnnnnnnnnnnnnnnnnnnnnnnnnnnnnnnnnnnnnnnnnnnnnnnnnnnnnnnnnnnnnnnnnnnnnnnnnnnnnnnnnnnnnnnnnnnnnnnnnnnnnnnnnnnnnnnnnnnnnnnnnnnnnnnnnnnnnnnnnnnnnnnnnnnnnnnnnnnnnnnnnnnnnnnnnnnnnnnnnnnnnnnnnnnnnnnnnnnnnnnnnnnnnnnnnnnnnnnnnnnnnnnnnnnnnnnnnnnnnnnnnnnnnnnnnnnnnnnnnnnnnnnnnnnnnnnnnnnnnnnnnnnnnnnnnnnnnnnnnnnnnnnnnnnnnnnnnnnnnnnnnnnnnnnnnnnnnnnnnnnnnnnnnnnnnnnnnnnnnnnnnnnnnnnnnnnnnnnnnnnnnnnnnnnnnnnnnnnnnnnnnnnnnnnnnnnnnnnnnnnnnnnnnnnnnnnnnnnnnnnnnnnnnnnnnnnnnnnnnnnnnnnnnnnnnnnnnnnnnnnnnnnnnnnnnnnnnnnnnnnnnnnnnnnnnnnnnnnnnnnnnnnnnnnnnnnnnnnnnnnnnnnnnnnnnnnnnnnnnnnnnnnnnnnnnnnnnnnnnnnnnnnnnnnnnnnnnnnnnnnnnnnnnnnnnnnnnnnnnnnnnnnnnnnnnnnnnnnnnnnnnnnnnnnnnnnnnnnnnnnnnnnnnnnnnnnnnnnnnnnnnnnnnnnnnnnnnnnnnnnnnnnnnnnnnnnnnnnnnnnnnnnnnnnnnnnnnnnnnnnnnnnnnnnnnnnnnnnnnnnnnnnnnnnnnnnnnnnnnnnnnnnnnnnnnnnnnnnnnnnnnnnnnnnnnnnnnnnnnnnnnnnnnnnnnnnnnnnnnnnnnnnnnnnnnnnnnnnnnnnnnnnnnnnnnnnnnnnnnnnnnnnnnnnnnnnnnnnnnnnnnnnnnnnnnnnnnnnnnnnnnnnnnnnnnnnnnnnnnnnnnnnnnnnnnnnnnnnnnnnnnnnnnnnnnnnnnnnnnnnnnnnnnnnnnnnnnnnnnnnnnnnnnnnnnnnnnnnnnnnnnnnnnnnnnnnnnnnnnnnnnnnnnnnnnnnnnnnnnnnnnnnnnnnnnnnnnnnnnnnnnnnnnnnnnnnnnnnnnnnnnnnnnnnnnnnnnnnnnnnnnnnnnnnnnnnnnnnnnnnnnnnnnnnnnnnnnnnnnnnnnnnnnnnnnnnnnnnnnnnnnnnnnnnnnnnnnnnnnnnnnnnnnnnnnnnnnnnnnnnnnnnnnnnnnnnnnnnnnnnnnnnnnnnnnnnnnnnnnnnnnnnnnnnnnnnnnnnnnnnnnnnnnnnnnnnnnnnnnnnnnnnnnnnnnnnnnnnnnnnnnnnnnnnnnnnnnnnnnnnnnnnnnnnnnnnnnnnnnnnnnnnnnnnnnnnnnnnnnnnnnnnnnnnnnnnnnnnnnnnnnnnnnnnnnnnnnnnnnnnnnnnnnnnnnnnnnnnnnnnnnnnnnnnnnnnnnnnnnnnnnnnnnnnnnnnnnnnnnnnnnnnnnnnnnnnnnnnnnnnnnnnnnnnnnnnnnnnnnnnnnnnnnnnnnnnnnnnnnnnnnnnnnnnnnnnnnnnnnnnnnnnnnnnnnnnnnnnnnnnnnnnnnnnnnnnnnnnnnnnnnnnnnnnnnnnnnnnnnnnnnnnnnnnnnnnnnnnnnnnnnnnnnnnnnnnnnnnnnnnnnnnnnnnnnnnnnnnnnnnnnnnnnnnnnnnnnnnnnnnnnnnnnnnnnnnnnnnnnnnnnnnnnnnnnnnnnnnnnnnnnnnnnnnnnnnnnnnnnnnnnnnnnnnnnnnnnnnnnnnnnnnnnnnnnnnnnnnnnnnnnnnnnnnnnnnnnnnnnnnnnnnnnnnnnnnnnnnnnnnnnnnnnnnnnnnnnnnnnnnnnnnnnnnnnnnnnnnnnnnnnnnnnnnnnnnnnnnnnnnnnnnnnnnnnnnnnnnnnnnnnnnnnnnnnnnnnnnnnnnnnnnnnnnnnnnnnnnnnnnnnnnnnnnnnnnnnnnnnnnnnnnnnnnnnnnnnnnnnnnnnnnnnnnnnnnnnnnnnnnnnnnnnnnnnnnnnnnnnnnnnnnnnnnnnnnnnnnnnnnnnnnnnnnnnnnnnnnnnnnnnnnnnnnnnnnnnnnnnnnnnnnnnnnnnnnnnnnnnnnnnnnnnnnnnnnnnnnnnnnnnnnnnnnnnnnnnnnnnnnnnnnnnnnnnnnnnnnnnnnnnnnnnnnnnnnnnnnnnnnnnnnnnnnnnnnnnnnnnnnnnnnnnnnnnnnnnnnnnnnnnnnnnnnnnnnnnnnnnnnnnnnnnnnnnnnnnnnnnnnnnnnnnnnnnnnnnnnnnnnnnnnnnnnnnnnnnnnnnnnnnnnnnnnnnnnnnnnnnnnnnnnnnnnnnnnnnnnnnnnnnnnnnnnnnnnnnnnnnnnnnnnnnnnnnnnnnnnnnnnnnnnnnnnnnnnnnnnnnnnnnnnnnnnnnnnnnnnnnnnnnnnnnnnnnnnnnnnnnnnnnnnnnnnnnnnnnnnnnnnnnnnnnnnnnnnnnnnnnnnnnnnnnnnnnnnnnnnnnnnnnnnnnnnnnnnnnnnnnnnnnnnnnnnnnnnnnnnnnnnnnnnnnnnnnnnnnnnnnnnnnnnnnnnnnnnnnnnnnnnnnnnnnnnnnnnnnnnnnnnnnnnnnnnnnnnnnnnnnnnnnnnnnnnnnnnnnnnnnnnnnnnnnnnnnnnnnnnnnnnnnnnnnnnnnnnnnnnnnnnnnnnnnnnnnnnnnnnnnnnnnnnnnnnnnnnnnnnnnnnnnnnnnnnnnnnnnnnnnnnnnnnnnnnnnnnnnnnnnnnnnnnnnnnnnnnnnnnnnnnnnnnnnnnnnnnnnnnnnnnnnnnnnnnnnnnnnnnnnnnnnnnnnnnnnnnnnnnnnnnnnnnnnnnnnnnnnnnnnnnnnnnnnnnnnnnnnnnnnnnnnnnnnnnnnnnnnnnnnnnnnnnnnnnnnnnnnnnnnnnnnnnnnnnnnnnnnnnnnnnnnnnnnnnnnnnnnnnnnnnnnnnnnnnnnnnnnnnnnnnnnnnnnnnnnnnnnnnnnnnnnnnnnnnnnnnnnnnnnnnnnnnnnnnnnnnnnnnnnnnnnnnnnnnnnnnnnnnnnnnnnnnnnnnnnnnnnnnnnnnnnnnnnnnnnnnnnnnnnnnnnnnnnnnnnnnnnnnnnnnnnnnnnnnnnnnnnnnnnnnnnnnnnnnnnnnnnnnnnnnnnnnnnnnnnnnnnnnnnnnnnnnnnnnnnnnnnnnnnnnnnnnnnnnnnnnnnnnnnnnnnnnnnnnnnnnnnnnnnnnnnnnnnnnnnnnnnnnnnnnnnnnnnnnnnnnnnnnnnnnnnnnnnnnnnnnnnnnnnnnnnnnnnnnnnnnnnnnnnnnnnnnnnnnnnnnnnnnnnnnnnnnnnnnnnnnnnnnnnnnnnnnnnnnnnnnnnnnnnnnnnnnnnnnnnnnnnnnnnnnnnnnnnnnnnnnnnnnnnnnnnnnnnnnnnnnnnnnnnnnnnnnnnnnnnnnnnnnnnnnnnnnnnnnnnnnnnnnnnnnnnnnnnnnnnnnnnnnnnnnnnnnnnnnnnnnnnnnnnnnnnnnnnnnnnnnnnnnnnnnnnnnnnnnnnnnnnnnnnnnnnnnnnnnnnnnnnnnnnnnnnnnnnnnnnnnnnnnnnnnnnnnnnnnnnnnnnnnnnnnnnnnnnnnnnnnnnnnnnnnnnnnnnnnnnnnnnnnnnnnnnnnnnnnnnnnnnnnnnnnnnnnnnnnnnnnnnnnnnnnnnnnnnnnnnnnnnnnnnnnnnnnnnnnnnnnnnnnnnnnnnnnnnnnnnnnnnnnnnnnnnnnnnnnnnnnnnnnnnnnnnnnnnnnnnnnnnnnnnnnnnnnnnnnnnnnnnnnnnnnnnnnnnnnnnnnnnnnnnnnnnnnnnnnnnnnnnnnnnnnnnnnnnnnnnnnnnnnnnnnnnnnnnnnnnnnnnnnnnnnnnnnnnnnnnnnnnnnnnnnnnnnnnnnnnnnnnnnnnnnnnnnnnnnnnnnnnnnnnnnnnnnnnnnnnnnnnnnnnnnnnnnnnnnnnnnnnnnnnnnnnnnnnnnnnnnnnnnnnnnnnnnnnnnnnnnnnnnnnnnnnnnnnnnnnnnnnnnnnnnnnnnnnnnnnnnnnnnnnnnnnnnnnnnnnnnnnnnnnnnnnnnnnnnnnnnnnnnnnnnnnnnnnnnnnnnnnnnnnnnnnnnnnnnnnnnnnnnnnnnnnnnnnnnnnnnnnnnnnnnnnnnnnnnnnnnnnnnnnnnnnnnnnnnnnnnnnnnnnnnnnnnnnnnnnnnnnnnnnnnnnnnnnnnnnnnnnnnnnnnnnnnnnnnnnnnnnnnnnnnnnnnnnnnnnnnnnnnnnnnnnnnnnnnnnnnnnnnnnnnnnnnnnnnnnnnnnnnnnnnnnnnnnnnnnnnnnnnnnnnnnnnnnnnnnnnnnnnnnnnnnnnnnnnnnnnnnnnnnnnnnnnnnnnnnnnnnnnnnnnnnnnnnnnnnnnnnnnnnnnnnnnnnnnnnnnnnnnnnnnnnnnnnnnnnnnnnnnnnnnnnnnnnnnnnnnnnnnnnnnnnnnnnnnnnnnnnnnnnnnnnnnnnnnnnnnnnnnnnnnnnnnnnnnnnnnnnnnnnnnnnnnnnnnnnnnnnnnnnnnnnnnnnnnnnnnnnnnnnnnnnnnnnnnnnnnnnnnnnnnnnnnnnnnnnnnnnnnnnnnnnnnnnnnnnnnnnnnnnnnnnnnnnnnnnnnnnnnnnnnnnnnnnnnnnnnnnnnnnnnnnnnnnnnnnnnnnnnnnnnnnnnnnnnnnnnnnnnnnnnnnnnnnnnnnnnnnnnnnnnnnnnnnnnnnnnnnnnnnnnnnnnnnnnnnnnnnnnnnnnnnnnnnnnnnnnnnnnnnnnnnnnnnnnnnnnnnnnnnnnnnnnnnnnnnnnnnnnnnnnnnnnnnnnnnnnnnnnnnnnnnnnnnnnnnnnnnnnnnnnnnnnnnnnnnnnnnnnnnnnnnnnnnnnnnnnnnnnnnnnnnnnnnnnnnnnnnnnnnnnnnnnnnnnnnnnnnnnnnnnnnnnnnnnnnnnnnnnnnnnnnnnnnnnnnnnnnnnnnnnnnnnnnnnnnnnnnnnnnnnnnnnnnnnnnnnnnnnnnnnnnnnnnnnnnnnnnnnnnnnnnnnnnnnnnnnnnnnnnnnnnnnnnnnnnnnnnnnnnnnnnnnnnnnnnnnnnnnnnnnnnnnnnnnnnnnnnnnnnnnnnnnnnnnnnnnnnnnnnnnnnnnnnnnnnnnnnnnnnnnnnnnnnnnnnnnnnnnnnnnnnnnnnnnnnnnnnnnnnnnnnnnnnnnnnnnnnnnnnnnnnnnnnnnnnnnnnnnnnnnnnnnnnnnnnnnnnnnnnnnnnnnnnnnnnnnnnnnnnnnnnnnnnnnnnnnnnnnnnnnnnnnnnnnnnnnnnnnnnnnnnnnnnnnnnnnnnnnnnnnnnnnnnnnnnnnnnnnnnnnnnnnnnnnnnnnnnnnnnnnnnnnnnnnnnnnnnnnnnnnnnnnnnnnnnnnnnnnnnnnnnnnnnnnnnnnnnnnnnnnnnnnnnnnnnnnnnnnnnnnnnnnnnnnnnnnnnnnnnnnnnnnnnnnnnnnnnnnnnnnnnnnnnnnnnnnnnnnnnnnnnnnnnnnnnnnnnnnnnnnnnnnnnnnnnnnnnnnnnnnnnnnnnnnnnnnnnnnnnnnnnnnnnnnnnnnnnnnnnnnnnnnnnnnnnnnnnnnnnnnnnnnnnnnnnnnnnnnnnnnnnnnnnnnnnnnnnnnnnnnnnnnnnnnnnnnnnnnnnnnnnnnnnnnnnnnnnnnnnnnnnnnnnnnnnnnnnnnnnnnnnnnnnnnnnnnnnnnnnnnnnnnnnnnnnnnnnnnnnnnnnnnnnnnnnnnnnnnnnnnnnnnnnnnnnnnnnnnnnnnnnnnnnnnnnnnnnnnnnnnnnnnnnnnnnnnnnnnnnnnnnnnnnnnnnnnnnnnnnnnnnnnnnnnnnnnnnnnnnnnnnnnnnnnnnnnnnnnnnnnnnnnnnnnnnnnnnnnnnnnnnnnnnnnnnnnnnnnnnnnnnnnnnnnnnnnnnnnnnnnnnnnnnnnnnnnnnnnnnnnnnnnnnnnnnnnnnnnnnnnnnnnnnnnnnnnnnnnnnnnnnnnnnnnnnnnnnnnnnnnnnnnnnnnnnnnnnnnnnnnnnnnnnnnnnnnnnnnnnnnnnnnnnnnnnnnnnnnnnnnnnnnnnnnnnnnnnnnnnnnnnnnnnnnnnnnnnnnnnnnnnnnnnnnnnnnnnnnnnnnnnnnnnnnnnnnnnnnnnnnnnnnnnnnnnnnnnnnnnnnnnnnnnnnnnnnnnnnnnnnnnnnnnnnnnnnnnnnnnnnnnnnnnnnnnnnnnnnnnnnnnnnnnnnnnnnnnnnnnnnnnnnnnnnnnnnnnnnnnnnnnnnnnnnnnnnnnnnnnnnnnnnnnnnnnnnnnnnnnnnnnnnnnnnnnnnnnnnnnnnnnnnnnnnnnnnnnnnnnnnnnnnnnnnnnnnnnnnnnnnnnnnnnnnnnnnnnnnnnnnnnnnnnnnnnnnnnnnnnnnnnnnnnnnnnnnnnnnnnnnnnnnnnnnnnnnnnnnnnnnnnnnnnnnnnnnnnnnnnnnnnnnnnnnnnnnnnnnnnnnnnnnnnnnnnnnnnnnnnnnnnnnnnnnnnnnnnnnnnnnnnnnnnnnnnnnnnnnnnnnnnnnnnnnnnnnnnnnnnnnnnnnnnnnnnnnnnnnnnnnnnnnnnnnnnnnnnnnnnnnnnnnnnnnnnnnnnnnnnnnnnnnnnnnnnnnnnnnnnnnnnnnnnnnnnnnnnnnnnnnnnnnnnnnnnnnnnnnnnnnnnnnnnnnnnnnnnnnnnnnnnnnnnnnnnnnnnnnnnnnnnnnnnnnnnnnnnnnnnnnnnnnnnnnnnnnnnnnnnnnnnnnnnnnnnnnnnnnnnnnnnnnnnnnnnnnnnnnnnnnnnnnnnnnnnnnnnnnnnnnnnnnnnnnnnnnnnnnnnnnnnnnnnnnnnnnnnnnnnnnnnnnnnnnnnnnnnnnnnnnnnnnnnnnnnnnnnnnnnnnnnnnnnnnnnnnnnnnnnnnnnnnnnnnnnnnnnnnnnnnnnnnnnnnnnnnnnnnnnnnnnnnnnnnnnnnnnnnnnnnnnnnnnnnnnnnnnnnnnnnnnnnnnnnnnnnnnnnnnnnnnnnnnnnnnnnnnnnnnnnnnnnnnnnnnnnnnnnnnnnnnnnnnnnnnnnnnnnnnnnnnnnnnnnnnnnnnnnnnnnnnnnnnnnnnnnnnnnnnnnnnnnnnnnnnnnnnnnnnnnnnnnnnnnnnnnnnnnnnnnnnnnnnnnnnnnnnnnnnnnnnnnnnnnnnnnnnnnnnnnnnnnnnnnnnnnnnnnnnnnnnnnnnnnnnnnnnnnnnnnnnnnnnnnnnnnnnnnnnnnnnnnnnnnnnnnnnnnnnnnnnnnnnnnnnnnnnnnnnnnnnnnnnnnnnnnnnnnnnnnnnnnnnnnnnnnnnnnnnnnnnnnnnnnnnnnnnnnnnnnnnnnnnnnnnnnnnnnnnnnnnnnnnnnnnnnnnnnnnnnnnnnnnnnnnnnnnnnnnnnnnnnnnnnnnnnnnnnnnnnnnnnnnnnnnnnnnnnnnnnnnnnnnnnnnnnnnnnnnnnnnnnnnnnnnnnnnnnnnnnnnnnnnnnnnnnnnnnnnnnnnnnnnnnnnnnnnnnnnnnnnnnnnnnnnnnnnnnnnnnnnnnnnnnnnnnnnnnnnnnnnnnnnnnnnnnnnnnnnnnnnnnnnnnnnnnnnnnnnnnnnnnnnnnnnnnnnnnnnnnnnnnnnnnnnnnnnnnnnnnnnnnnnnnnnnnnnnnnnnnnnnnnnnnnnnnnnnnnnnnnnnnnnnnnnnnnnnnnnnnnnnnnnnnnnnnnnnnnnnnnnnnnnnnnnnnnnnnnnnnnnnnnnnnnnnnnnnnnnnnnnnnnnnnnnnnnnnnnnnnnnnnnnnnnnnnnnnnnnnnnnnnnnnnnnnnnnnnnnnnnnnnnnnnnnnnnnnnnnnnnnnnnnnnnnnnnnnnnnnnnnnnnnnnnnnnnnnnnnnnnnnnnnnnnnnnnnnnnnnnnnnnnnnnnnnnnnnnnnnnnnnnnnnnnnnnnnnnnnnnnnnnnnnnnnnnnnnnnnnnnnnnnnnnnnnnnnnnnnnnnnnnnnnnnnnnnnnnnnnnnnnnnnnnnnnnnnnnnnnnnnnnnnnnnnnnnnnnnnnnnnnnnnnnnnnnnnnnnnnnnnnnnnnnnnnnnnnnnnnnnnnnnnnnnnnnnnnnnnnnnnnnnnnnnnnnnnnnnnnnnnnnnnnnnnnnnnnnnnnnnnnnnnnnnnnnnnnnnnnnnnnnnnnnnnnnnnnnnnnnnnnnnnnnnnnnnnnnnnnnnnnnnnnnnnnnnnnnnnnnnnnnnnnnnnnnnnnnnnnnnnnnnnnnnnnnnnnnnnnnnnnnnnnnnnnnnnnnnnnnnnnnnnnnnnnnnnnnnnnnnnnnnnnnnnnnnnnnnnnnnnnnnnnnnnnnnnnnnnnnnnnnnnnnnnnnnnnnnnnnnnnnnnnnnnnnnnnnnnnnnnnnnnnnnnnnnnnnnnnnnnnnnnnnnnnnnnnnnnnnnnnnnnnnnnnnnnnnnnnnnnnnnnnnnnnnnnnnnnnnnnnnnnnnnnnnnnnnnnnnnnnnnnnnnnnnnnnnnnnnnnnnnnnnnnnnnnnnnnnnnnnnnnnnnnnnnnnnnnnnnnnnnnnnnnnnnnnnnnnnnnnnnnnnnnnnnnnnnnnnnnnnnnnnnnnnnnnnnnnnnnnnnnnnnnnnnnnnnnnnnnnnnnnnnnnnnnnnnnnnnnnnnnnnnnnnnnnnnnnnnnnnnnnnnnnnnnnnnnnnnnnnnnnnnnnnnnnnnnnnnnnnnnnnnnnnnnnnnnnnnnnnnnnnnnnnnnnnnnnnnnnnnnnnnnnnnnnnnnnnnnnnnnnnnnnnnnnnnnnnnnnnnnnnnnnnnnnnnnnnnnnnnnnnnnnnnnnnnnnnnnnnnnnnnnnnnnnnnnnnnnnnnnnnnnnnnnnnnnnnnnnnnnnnnnnnnnnnnnnnnnnnnnnnnnnnnnnnnnnnnnnnnnnnnnnnnnnnnnnnnnnnnnnnnnnnnnnnnnnnnnnnnnnnnnnnnnnnnnnnnnnnnnnnnnnnnnnnnnnnnnnnnnnnnnnnnnnnnnnnnnnnnnnnnnnnnnnnnnnnnnnnnnnnnnnnnnnnnnnnnnnnnnnnnnnnnnnnnnnnnnnnnnnnnnnnnnnnnnnnnnnnnnnnnnnnnnnnnnnnnnnnnnnnnnnnnnnnnnnnnnnnnnnnnnnnnnnnnnnnnnnnnnnnnnnnnnnnnnnnnnnnnnnnnnnnnnnnnnnnnnnnnnnnnnnnnnnnnnnnnnnnnnnnnnnnnnnnnnnnnnnnnnnnnnnnnnnnnnnnnnnnnnnnnnnnnnnnnnnnnnnnnnnnnnnnnnnnnnnnnnnnnnnnnnnnnnnnnnnnnnnnnnnnnnnnnnnnnnnnnnnnnnnnnnnnnnnnnnnnnnnnnnnnnnnnnnnnnnnnnnnnnnnnnnnnnnnnnnnnnnnnnnnnnnnnnnnnnnnnnnnnnnnnnnnnnnnnnnnnnnnnnnnnnnnnnnnnnnnnnnnnnnnnnnnnnnnnnnnnnnnnnnnnnnnnnnnnnnnnnnnnnnnnnnnnnnnnnnnnnnnnnnnnnnnnnnnnnnnnnnnnnnnnnnnnnnnnnnnnnnnnnnnnnnnnnnnnnnnnnnnnnnnnnnnnnnnnnnnnnnnnnnnnnnnnnnnnnnnnnnnnnnnnnnnnnnnnnnnnnnnnnnnnnnnnnnnnnnnnnnnnnnnnnnnnnnnnnnnnnnnnnnnnnnnnnnnnnnnnnnnnnnnnnnnnnnnnnnnnnnnnnnnnnnnnnnnnnnnnnnnnnnnnnnnnnnnnnnnnnnnnnnnnnnnnnnnnnnnnnnnnnnnnnnnnnnnnnnnnnnnnnnnnnnnnnnnnnnnnnnnnnnnnnnnnnnnnnnnnnnnnnnnnnnnnnnnnnnnnnnnnnnnnnnnnnnnnnnnnnnnnnnnnnnnnnnnnnnnnnnnnnnnnnnnnnnnnnnnnnnnnnnnnnnnnnnnnnnnnnnnnnnnnnnnnnnnnnnnnnnnnnnnnnnnnnnnnnnnnnnnnnnnnnnnnnnnnnnnnnnnnnnnnnnnnnnnnnnnnnnnnnnnnnnnnnnnnnnnnnnnnnnnnnnnnnnnnnnnnnnnnnnnnnnnnnnnnnnnnnnnnnnnnnnnnnnnnnnnnnnnnnnnnnnnnnnnnnnnnnnnnnnnnnnnnnnnnnnnnnnnnnnnnnnnnnnnnnnnnnnnnnnnnnnnnnnnnnnnnnnnnnnnnnnnnnnnnnnnnnnnnnnnnnnnnnnnnnnnnnnnnnnnnnnnnnnnnnnnnnnnnnnnnnnnnnnnnnnnnnnnnnnnnnnnnnnnnnnnnnnnnnnnnnnnnnnnnnnnnnnnnnnnnnnnnnnnnnnnnnnnnnnnnnnnnnnnnnnnnnnnnnnnnnnnnnnnnnnnnnnnnnnnnnnnnnnnnnnnnnnnnnnnnnnnnnnnnnnnnnnnnnnnnnnnnnnnnnnnnnnnnnnnnnnnnnnnnnnnnnnnnnnnnnnnnnnnnnnnnnnnnnnnnnnnnnnnnnnnnnnnnnnnnnnnnnnnnnnnnnnnnnnnnnnnnnnnnnnnnnnnnnnnnnnnnnnnnnnnnnnnnnnnnnnnnnnnnnnnnnnnnnnnnnnnnnnnnnnnnnnnnnnnnnnnnnnnnnnnnnnnnnnnnnnnnnnnnnnnnnnnnnnnnnnnnnnnnnnnnnnnnnnnnnnnnnnnnnnnnnnnnnnnnnnnnnnnnnnnnnnnnnnnnnnnnnnnnnnnnnnnnnnnnnnnnnnnnnnnnnnnnnnnnnnnnnnnnnnnnnnnnnnnnnnnnnnnnnnnnnnnnnnnnnnnnnnnnnnnnnnnnnnnnnnnnnnnnnnnnnnnnnnnnnnnnnnnnnnnnnnnnnnnnnnnnnnnnnnnnnnnnnnnnnnnnnnnnnnnnnnnnnnnnnnnnnnnnnnnnnnnnnnnnnnnnnnnnnnnnnnnnnnnnnnnnnnnnnnnnnnnnnnnnnnnnnnnnnnnnnnnnnnnnnnnnnnnnnnnnnnnnnnnnnnnnnnnnnnnnnnnnnnnnnnnnnnnnnnnnnnnnnnnnnnnnnnnnnnnnnnnnnnnnnnnnnnnnnnnnnnnnnnnnnnnnnnnnnnnnnnnnnnnnnnnnnnnnnnnnnnnnnnnnnnnnnnnnnnnnnnnnnnnnnnnnnnnnnnnnnnnnnnnnnnnnnnnnnnnnnnnnnnnnnnnnnnnnnnnnnnnnnnnnnnnnnnnnnnnnnnnnnnnnnnnnnnnnnnnnnnnnnnnnnnnnnnnnnnnnnnnnnnnnnnnnnnnnnnnnnnnnnnnnnnnnnnnnnnnnnnnnnnnnnnnnnnnnnnnnnnnnnnnnnnnnnnnnnnnnnnnnnnnnnnnnnnnnnnnnnnnnnnnnnnnnnnnnnnnnnnnnnnnnnnnnnnnnnnnnnnnnnnnnnnnnnnnnnnnnnnnnnnnnnnnnnnnnnnnnnnnnnnnnnnnnnnnnnnnnnnnnnnnnnnnnnnnnnnnnnnnnnnnnnnnnnnnnnnnnnnnnnnnnnnnnnnnnnnnnnnnnnnnnnnnnnnnnnnnnnnnnnnnnnnnnnnnnnnnnnnnnnnnnnnnnnnnnnnnnnnnnnnnnnnnnnnnnnnnnnnnnnnnnnnnnnnnnnnnnnnnnnnnnnnnnnnnnnnnnnnnnnnnnnnnnnnnnnnnnnnnnnnnnnnnnnnnnnnnnnnnnnnnnnnnnnnnnnnnnnnnnnnnnnnnnnnnnnnnnnnnnnnnnnnnnnnnnnnnnnnnnnnnnnnnnnnnnnnnnnnnnnnnnnnnnnnnnnnnnnnnnnnnnnnnnnnnnnnnnnnnnnnnnnnnnnnnnnnnnnnnnnnnnnnnnnnnnnnnnnnnnnnnnnnnnnnnnnnnnnnnnnnnnnnnnnnnnnnnnnnnnnnnnnnnnnnnnnnnnnnnnnnnnnnnnnnnnnnnnnnnnnnnnnnnnnnnnnnnnnnnnnnnnnnnnnnnnnnnnnnnnnnnnnnnnnnnnnnnnnnnnnnnnnnnnnnnnnnnnnnnnnnnnnnnnnnnnnnnnnnnnnnnnnnnnnnnnnnnnnnnnnnnnnnnnnnnnnnnnnnnnnnnnnnnnnnnnnnnnnnnnnnnnnnnnnnnnnnnnnnnnnnnnnnnnnnnnnnnnnnnnnnnnnnnnnnnnnnnnnnnnnnnnnnnnnnnnnnnnnnnnnnnnnnnnnnnnnnnnnnnnnnnnnnnnnnnnnnnnnnnnnnnnnnnnnnnnnnnnnnnnnnnnnnnnnnnnnnnnnnnnnnnnnnnnnnnnnnnnnnnnnnnnnnnnnnnnnnnnnnnnnnnnnnnnnnnnnnnnnnnnnnnnnnnnnnnnnnnnnnnnnnnnnnnnnnnnnnnnnnnnnnnnnnnnnnnnnnnnnnnnnnnnnnnnnnnnnnnnnnnnnnnnnnnnnnnnnnnnnnnnnnnnnnnnnnnnnnnnnnnnnnnnnnnnnnnnnnnnnnnnnnnnnnnnnnnnnnnnnnnnnnnnnnnnnnnnnnnnnnnnnnnnnnnnnnnnnnnnnnnnnnnnnnnnnnnnnnnnnnnnnnnnnnnnnnnnnnnnnnnnnnnnnnnnnnnnnnnnnnnnnnnnnnnnnnnnnnnnnnnnnnnnnnnnnnnnnnnnnnnnnnnnnnnnnnnnnnnnnnnnnnnnnnnnnnnnnnnnnnnnnnnnnnnnnnnnnnnnnnnnnnnnnnnnnnnnnnnnnnnnnnnnnnnnnnnnnnnnnnnnnnnnnnnnnnnnnnnnnnnnnnnnnnnnnnnnnnnnnnnnnnnnnnnnnnnnnnnnnnnnnnnnnnnnnnnnnnnnnnnnnnnnnnnnnnnnnnnnnnnnnnnnnnnnnnnnnnnnnnnnnnnnnnnnnnnnnnnnnnnnnnnnnnnnnnnnnnnnnnnnnnnnnnnnnnnnnnnnnnnnnnnnnnnnnnnnnnnnnnnnnnnnnnnnnnnnnnnnnnnnnnnnnnnnnnnnnnnnnnnnnnnnnnnnnnnnnnnnnnnnnnnnnnnnnnnnnnnnnnnnnnnnnnnnnnnnnnnnnnnnnnnnnnnnnnnnnnnnnnnnnnnnnnnnnnnnnnnnnnnnnnnnnnnnnnnnnnnnnnnnnnnnnnnnnnnnnnnnnnnnnnnnnnnnnnnnnnnnnnnnnnnnnnnnnnnnnnnnnnnnnnnnnnnnnnnnnnnnnnnnnnnnnnnnnnnnnnnnnnnnnnnnnnnnnnnnnnnnnnnnnnnnnnnnnnnnnnnnnnnnnnnnnnnnnnnnnnnnnnnnnnnnnnnnnnnnnnnnnnnnnnnnnnnnnnnnnnnnnnnnnnnnnnnnnnnnnnnnnnnnnnnnnnnnnnnnnnnnnnnnnnnnnnnnnnnnnnnnnnnnnnnnnnnnnnnnnnnnnnnnnnnnnnnnnnnnnnnnnnnnnnnnnnnnnnnnnnnnnnnnnnnnnnnnnnnnnnnnnnnnnnnnnnnnnnnnnnnnnnnnnnnnnnnnnnnnnnnnnnnnnnnnnnnnnnnnnnnnnnnnnnnnnnnnnnnnnnnnnnnnnnnnnnnnnnnnnnnnnnnnnnnnnnnnnnnnnnnnnnnnnnnnnnnnnnnnnnnnnnnnnnnnnnnnnnnnnnnnnnnnnnnnnnnnnnnnnnnnnnnnnnnnnnnnnnnnnnnnnnnnnnnnnnnnnnnnnnnnnnnnnnnnnnnnnnnnnnnnnnnnnnnnnnnnnnnnnnnnnnnnnnnnnnnnnnnnnnnnnnnnnnnnnnnnnnnnnnnnnnnnnnnnnnnnnnnnnnnnnnnnnnnnnnnnnnnnnnnnnnnnnnnnnnnnnnnnnnnnnnnnnnnnnnnnnnnnnnnnnnnnnnnnnnnnnnnnnnnnnnnnnnnnnnnnnnnnnnnnnnnnnnnnnnnnnnnnnnnnnnnnnnnnnnnnnnnnnnnnnnnnnnnnnnnnnnnnnnnnnnnnnnnnnnnnnnnnnnnnnnnnnnnnnnnnnnnnnnnnnnnnnnnnnnnnnnnnnnnnnnnnnnnnnnnnnnnnnnnnnnnnnnnnnnnnnnnnnnnnnnnnnnnnnnnnnnnnnnnnnnnnnnnnnnnnnnnnnnnnnnnnnnnnnnnnnnnnnnnnnnnnnnnnnnnnnnnnnnnnnnnnnnnnnnnnnnnnnnnnnnnnnnnnnnnnnnnnnnnnnnnnnnnnnnnnnnnnnnnnnnnnnnnnnnnnnnnnnnnnnnnnnnnnnnnnnnnnnnnnnnnnnnnnnnnnnnnnnnnnnnnnnnnnnnnnnnnnnnnnnnnnnnnnnnnnnnnnnnnnnnnnnnnnnnnnnnnnnnnnnnnnnnnnnnnnnnnnnnnnnnnnnnnnnnnnnnnnnnnnnnnnnnnnnnnnnnnnnnnnnnnnnnnnnnnnnnnnnnnnnnnnnnnnnnnnnnnnnnnnnnnnnnnnnnnnnnnnnnnnnnnnnnnnnnnnnnnnnnnnnnnnnnnnnnnnnnnnnnnnnnnnnnnnnnnnnnnnnnnnnnnnnnnnnnnnnnnnnnnnnnnnnnnnnnnnnnnnnnnnnnnnnnnnnnnnnnnnnnnnnnnnnnnnnnnnnnnnnnnnnnnnnnnnnnnnnnnnnnnnnnnnnnnnnnnnnnnnnnnnnnnnnnnnnnnnnnnnnnnnnnnnnnnnnnnnnnnnnnnnnnnnnnnnnnnnnnnnnnnnnnnnnnnnnnnnnnnnnnnnnnnnnnnnnnnnnnnnnnnnnnnnnnnnnnnnnnnnnnnnnnnnnnnnnnnnnnnnnnnnnnnnnnnnnnnnnnnnnnnnnnnnnnnnnnnnnnnnnnnnnnnnnnnnnnnnnnnnnnnnnnnnnnnnnnnnnnnnnnnnnnnnnnnnnnnnnnnnnnnnnnnnnnnnnnnnnnnnnnnnnnnnnnnnnnnnnnnnnnnnnnnnnnnnnnnnnnnnnnnnnnnnnnnnnnnnnnnnnnnnnnnnnnnnnnnnnnnnnnnnnnnnnnnnnnnnnnnnnnnnnnnnnnnnnnnnnnnnnnnnnnnnnnnnnnnnnnnnnnnnnnnnnnnnnnnnnnnnnnnnnnnnnnnnnnnnnnnnnnnnnnnnnnnnnnnnnnnnnnnnnnnnnnnnnnnnnnnnnnnnnnnnnnnnnnnnnnnnnnnnnnnnnnnnnnnnnnnnnnnnnnnnnnnnnnnnnnnnnnnnnnnnnnnnnnnnnnnnnnnnnnnnnnnnnnnnnnnnnnnnnnnnnnnnnnnnnnnnnnnnnnnnnnnnnnnnnnnnnnnnnnnnnnnnnnnnnnnnnnnnnnnnnnnnnnnnnnnnnnnnnnnnnnnnnnnnnnnnnnnnnnnnnnnnnnnnnnnnnnnnnnnnnnnnnnnnnnnnnnnnnnnnnnnnnnnnnnnnnnnnnnnnnnnnnnnnnnnnnnnnnnnnnnnnnnnnnnnnnnnnnnnnnnnnnnnnnnnnnnnnnnnnnnnnnnnnnnnnnnnnnnnnnnnnnnnnnnnnnnnnnnnnnnnnnnnnnnnnnnnnnnnnnnnnnnnnnnnnnnnnnnnnnnnnnnnnnnnnnnnnnnnnnnnnnnnnnnnnnnnnnnnnnnnnnnnnnnnnnnnnnnnnnnnnnnnnnnnnnnnnnnnnnnnnnnnnnnnnnnnnnnnnnnnnnnnnnnnnnnnnnnnnnnnnnnnnnnnnnnnnnnnnnnnnnnnnnnnnnnnnnnnnnnnnnnnnnnnnnnnnnnnnnnnnnnnnnnnnnnnnnnnnnnnnnnnnnnnnnnnnnnnnnnnnnnnnnnnnnnnnnnnnnnnnnnnnnnnnnnnnnnnnnnnnnnnnnnnnnnnnnnnnnnnnnnnnnnnnnnnnnnnnnnnnnnnnnnnnnnnnnnnnnnnnnnnnnnnnnnnnnnnnnnnnnnnnnnnnnnnnnnnnnnnnnnnnnnnnnnnnnnnnnnnnnnnnnnnnnnnnnnnnnnnnnnnnnnnnnnnnnnnnnnnnnnnnnnnnnnnnnnnnnnnnnnnnnnnnnnnnnnnnnnnnnnnnnnnnnnnnnnnnnnnnnnnnnnnnnnnnnnnnnnnnnnnnnnnnnnnnnnnnnnnnnnnnnnnnnnnnnnnnnnnnnnnnnnnnnnnnnnnnnnnnnnnnnnnnnnnnnnnnnnnnnnnnnnnnnnnnnnnnnnnnnnnnnnnnnnnnnnnnnnnnnnnnnnnnnnnnnnnnnnnnnnnnnnnnnnnnnnnnnnnnnnnnnnnnnnnnnnnnnnnnnnnnnnnnnnnnnnnnnnnnnnnnnnnnnnnnnnnnnnnnnnnnnnnnnnnnnnnnnnnnnnnnnnnnnnnnnnnnnnnnnnnnnnnnnnnnnnnnnnnnnnnnnnnnnnnnnnnnnnnnnnnnnnnnnnnnnnnnnnnnnnnnnnnnnnnnnnnnnnnnnnnnnnnnnnnnnnnnnnnnnnnnnnnnnnnnnnnnnnnnnnnnnnnnnnnnnnnnnnnnnnnnnnnnnnnnnnnnnnnnnnnnnnnnnnnnnnnnnnnnnnnnnnnnnnnnnnnnnnnnnnnnnnnnnnnnnnnnnnnnnnnnnnnnnnnnnnnnnnnnnnnnnnnnnnnnnnnnnnnnnnnnnnnnnnnnnnnnnnnnnnnnnnnnnnnnnnnnnnnnnnnnnnnnnnnnnnnnnnnnnnnnnnnnnnnnnnnnnnnnnnnnnnnnnnnnnnnnnnnnnnnnnnnnnnnnnnnnnnnnnnnnnnnnnnnnnnnnnnnnnnnnnnnnnnnnnnnnnnnnnnnnnnnnnnnnnnnnnnnnnnnnnnnnnnnnnnnnnnnnnnnnnnnnnnnnnnnnnnnnnnnnnnnnnnnnnnnnnnnnnnnnnnnnnnnnnnnnnnnnnnnnnnnnnnnnnnnnnnnnnnnnnnnnnnnnnnnnnnnnnnnnnnnnnnnnnnnnnnnnnnnnnnnnnnnnnnnnnnnnnnnnnnnnnnnnnnnnnnnnnnnnnnnnnnnnnnnnnnnnnnnnnnnnnnnnnnnnnnnnnnnnnnnnnnnnnnnnnnnnnnnnnnnnnnnnnnnnnnnnnnnnnnnnnnnnnnnnnnnnnnnnnnnnnnnnnnnnnnnnnnnnnnnnnnnnnnnnnnnnnnnnnnnnnnnnnnnnnnnnnnnnnnnnnnnnnnnnnnnnnnnnnnnnnnnnnnnnnnnnnnnnnnnnnnnnnnnnnnnnnnnnnnnnnnnnnnnnnnnnnnnnnnnnnnnnnnnnnnnnnnnnnnnnnnnnnnnnnnnnnnnnnnnnnnnnnnnnnnnnnnnnnnnnnnnnnnnnnnnnnnnnnnnnnnnnnnnnnnnnnnnnnnnnnnnnnnnnnnnnnnnnnnnnnnnnnnnnnnnnnnnnnnnnnnnnnnnnnnnnnnnnnnnnnnnnnnnnnnnnnnnnnnnnnnnnnnnnnnnnnnnnnnnnnnnnnnnnnnnnnnnnnnnnnnnnnnnnnnnnnnnnnnnnnnnnnnnnnnnnnnnnnnnnnnnnnnnnnnnnnnnnnnnnnnnnnnnnnnnnnnnnnnnnnnnnnnnnnnnnnnnnnnnnnnnnnnnnnnnnnnnnnnnnnnnnnnnnnnnnnnnnnnnnnnnnnnnnnnnnnnnnnnnnnnnnnnnnnnnnnnnnnnnnnnnnnnnnnnnnnnnnnnnnnnnnnnnnnnnnnnnnnnnnnnnnnnnnnnnnnnnnnnnnnnnnnnnnnnnnnnnnnnnnnnnnnnnnnnnnnnnnnnnnnnnnnnnnnnnnnnnnnnnnnnnnnnnnnnnnnnnnnnnnnnnnnnnnnnnnnnnnnnnnnnnnnnnnnnnnnnnnnnnnnnnnnnnnnnnnnnnnnnnnnnnnnnnnnnnnnnnnnnnnnnnnnnnnnnnnnnnnnnnnnnnnnnnnnnnnnnnnnnnnnnnnnnnnnnnnnnnnnnnnnnnnnnnnnnnnnnnnnnnnnnnnnnnnnnnnnnnnnnnnnnnnnnnnnnnnnnnnnnnnnnnnnnnnnnnnnnnnnnnnnnnnnnnnnnnnnnnnnnnnnnnnnnnnnnnnnnnnnnnnnnnnnnnnnnnnnnnnnnnnnnnnnnnnnnnnnnnnnnnnnnnnnnnnnnnnnnnnnnnnnnnnnnnnnnnnnnnnnnnnnnnnnnnnnnnnnnnnnnnnnnnnnnnnnnnnnnnnnnnnnnnnnnnnnnnnnnnnnnnnnnnnnnnnnnnnnnnnnnnnnnnnnnnnnnnnnnnnnnnnnnnnnnnnnnnnnnnnnnnnnnnnnnnnnnnnnnnnnnnnnnnnnnnnnnnnnnnnnnnnnnnnnnnnnnnnnnnnnnnnnnnnnnnnnnnnnnnnnnnnnnnnnnnnnnnnnnnnnnnnnnnnnnnnnnnnnnnnnnnnnnnnnnnnnnnnnnnnnnnnnnnnnnnnnnnnnnnnnnnnnnnnnnnnnnnnnnnnnnnnnnnnnnnnnnnnnnnnnnnnnnnnnnnnnnnnnnnnnnnnnnnnnnnnnnnnnnnnnnnnnnnnnnnnnnnnnnnnnnnnnnnnnnnnnnnnnnnnnnnnnnnnnnnnnnnnnnnnnnnnnnnnnnnnnnnnnnnnnnnnnnnnnnnnnnnnnnnnnnnnnnnnnnnnnnnnnnnnnnnnnnnnnnnnnnnnnnnnnnnnnnnnnnnnnnnnnnnnnnnnnnnnnnnnnnnnnnnnnnnnnnnnnnnnnnnnnnnnnnnnnnnnnnnnnnnnnnnnnnnnnnnnnnnnnnnnnnnnnnnnnnnnnnnnnnnnnnnnnnnnnnnnnnnnnnnnnnnnnnnnnnnnnnnnnnnnnnnnnnnnnnnnnnnnnnnnnnnnnnnnnnnnnnnnnnnnnnnnnnnnnnnnnnnnnnnnnnnnnnnnnnnnnnnnnnnnnnnnnnnnnnnnnnnnnnnnnnnnnnnnnnnnnnnnnnnnnnnnnnnnnnnnnnnnnnnnnnnnnnnnnnnnnnnnnnnnnnnnnnnnnnnnnnnnnnnnnnnnnnnnnnnnnnnnnnnnnnnnnnnnnnnnnnnnnnnnnnnnnnnnnnnnnnnnnnnnnnnnnnnnnnnnnnnnnnnnnnnnnnnnnnnnnnnnnnnnnnnnnnnnnnnnnnnnnnnnnnnnnnnnnnnnnnnnnnnnnnnnnnnnnnnnnnnnnnnnnnnnnnnnnnnnnnnnnnnnnnnnnnnnnnnnnnnnnnnnnnnnnnnnnnnnnnnnnnnnnnnnnnnnnnnnnnnnnnnnnnnnnnnnnnnnnnnnnnnnnnnnnnnnnnnnnnnnnnnnnnnnnnnnnnnnnnnnnnnnnnnnnnnnnnnnnnnnnnnnnnnnnnnnnnnnnnnnnnnnnnnnnnnnnnnnnnnnnnnnnnnnnnnnnnnnnnnnnnnnnnnnnnnnnnnnnnnnnnnnnnnnnnnnnnnnnnnnnnnnnnnnnnnnnnnnnnnnnnnnnnnnnnnnnnnnnnnnnnnnnnnnnnnnnnnnnnnnnnnnnnnnnnnnnnnnnnnnnnnnnnnnnnnnnnnnnnnnnnnnnnnnnnnnnnnnnnnnnnnnnnnnnnnnnnnnnnnnnnnnnnnnnnnnnnnn
